(19) United States
(12) Patent Application Publication
(10) Pub. No.: US 2007/0053924 A1
(43) Pub. Date: Mar. 8, 2007

(54) Conserved and specific streptococcal genomes

(76) Inventors: Herve Tettelin, Rockville, MD (US); Vega Masignani, Siema (IT)

Correspondence Address: NOVARTIS VACCINES AND DIAGNOSTICS INC., CORPORATE INTELLECTUAL PROPERTY R338, P.O. BOX 8097, Emeryville, CA, 94662-8097, US

(21) Appl. No.: 10/525,536

(22) PCT Filed: Aug. 26, 2003
(86) PCT No.: PCT/US03/26827

§ 371 Date: Jul. 19, 2006

Related U.S. Application Data
(60) Provisional application No. 60/406,237, filed on Aug. 26, 2002.
(60) Provisional application No. 60/406,676, filed on Aug. 27, 2002.
(60) Provisional application No. 60/406,757, filed on Aug. 28, 2002.

(51) Int. Cl. A61K 39/09; C07H 21/04

(52) U.S. Cl. 424/190.1; 424/244.1; 536/23.7

(57) ABSTRACT

The invention relates to polynucleotides which are conserved or specific to one or more species of Streptococcus, Streptococcus species serotypes, and/or serotype isolates. In particular, the invention relates to polynucleotides from Streptococcus which are conserved or specific to one or more of the species of S. pneumoniae (“pneumococcus” or “S. pn.”), S. pyogenes (“group A streptococcus” or “GAS”), and S. agalactiae (“group B streptococcus” or “GBS”). The invention further relates to polynucleotides which are conserved or specific to one or more Streptococcal species serotypes, such as GBS serotypes Ia, Ib, II, III, IV, V, VI, VII, and VIII. The invention still further relates to polynucleotides which are conserved or specific to one or more clinical isolates of a Streptococcus species.

### CROSS REFERENCE TO RELATED APPLICATIONS

[0001] This application claims priority of U.S. provisional patent application Ser. No. 60/406,237, filed Aug. 26, 2002, U.S. provisional patent application Ser. No. 60/406,676, filed Aug. 27, 2002 and U.S. provisional patent application Ser. No. 60/406,757, filed Aug. 28, 2002.

### FIELD OF THE INVENTION

[0002] The invention relates to polynucleotides which are conserved or specific to one or more species of Streptococcus, Streptococcus species serotypes, and/or serotype isolates. The conserved or specific genomic regions can be used to identify, screen and develop vaccines and other treatments for Streptococcal infections and can be used in diagnostic assays to diagnose and identify Streptococcal infections.

### BACKGROUND OF THE INVENTION

[0003] The genus Streptococcus consists of Gram-positive, chain-forming, spherical bacterial cells. Three species of clinical interest are S.pneumoniae (“pneumococcus” or “S.pn.”), S.pyogenes (‘group A streptococcus’ or ‘GAS’) and S.agalactiae (‘group B streptococcus’ or ‘GBS’). Infections with these three pathogenic streptococci lead to conditions including pharyngitis, toxic shock syndrome and necrotizing fasciitis.

[0004] Once thought to infect only cows, GBS is now known to cause serious disease, bacteraemia and meningitis in immunocompromised individuals and neonates. There are two known types of neonatal infection. The first (early onset, usually within 5 days of birth) is manifested by bacteraemia and infection. It is generally contracted vertically as a baby passes through the birth canal. GBS is thought to colonize the vagina of about 25% of young women; approximately 1% of infants born via a vaginal birth to colonised mothers will become infected. Mortality resulting from these infections is between 50-70%. The second type of neonatal infection is a meningitis that occurs 10 to 60 days after birth. If pregnant women are vaccinated with type III capsule so that the infants are passively immunised, the incidence of the late onset meningitis is generally reduced, although not entirely eliminated.

[0005] The “B” in “GBS” refers to the Lancefield classification, which is based on the antigenicity of a carbohydrate which is soluble in dilute acid and called the C carbohydrate. Lancefield identified 13 types of C carbohydrate, designated A to O, that could be serologically differentiated. The organisms that most commonly infect humans are found in groups A, B, D, and G. Within group B, strains can be divided into at least 9 serotypes (Ia, Ib, II, III, IV, V, VI, VII, and VIII) based on the structure of their polysaccharide capsule. Further categories based on, for example, the expression of certain proteins have also been developed.

[0006] GBS strains of polysaccharide capsule Type V were rarely isolated before the mid-1980's but now account for approximately one-third of clinical isolates in the US. Type V is the most common capsular serotype associated with invasive infection in nonpregnant adults, and the emergence of Type V strain over the past decade has been temporarily linked to an increase in GBS disease in this population.

[0007] Group A streptococcus is a frequent human pathogen, estimated to be present in between 5-15% of normal individuals without signs of disease. When host defences are compromised, or when the organism is able to exert its virulence, or when it is introduced into vulnerable tissues or hosts, however, an acute infection occurs. Diseases include puerperal fever, scarlet fever, erysipelas, pharyngitis, impetigo, necrotising fasciitis, myositis and streptococcal toxic shock syndrome.

[0008] Pneumococcus is the most common cause of acute respiratory infection and otitis media and is estimated to result in over 3 million deaths in children every year worldwide from pneumonia, bacteremia, or meningitis. Even more deaths occur among elderly people, among whom S. pn. is the leading cause of community-acquired pneumonia and meningitis. Since 1990, the number of penicillin-resistant strains has increased from 1 to 5% to 25 to 80% of isolates, and many strains are now resistant to commonly prescribed antibiotics such as penicillin, macrolides, and fluoroquinolones. See Tettelin, et al. (2001) Science 293, 248-506.

[0009] The complete genomic sequence of a virulent isolate of S. pneumoniae was published by Tettelin, et al. (2001) Science 293, 248-506 and is available at the TIGR website at http://www.tigr.org. as well as on GEN BANK (available through the Pub Med website at http://www.ncbi.nlm.nih.gov/entrez/query.fcgi). The genomic sequence, the Tettelin article and its published supplemental material are incorporated herein by reference in their entirety.

[0010] The complete genomic sequence of an M1 strain of S. pyrogenes was published by Ferretti, et al. (2001) Proc. Natl. Acad. Sci. USA 98, 4658-4663 and is available at the TIGR website at http://www.tigr.org. The genomic sequence, the Ferretti article and its published supplemental materials are incorporated herein by reference in their entirety.

[0011] The complete genomic sequence of a serotype V strain of S. agalactiae (type V strain 2603 V/R) was published on Aug. 28, 2002 at Gen Bank Accession no. AE009948 (available through Pub Med at http://www.ncbi.nlm.nih.gov/entrez/query.fcgi and/or was available on the same day at the TIGR website at http://www.tigr.org. Most of this sequence is also availabe in PCT International Patent Application Publication WO 02/34771. The genomic sequence, the Tettelin article and its published supplemental materials are incorporated herein by reference in their entirety.

[0012] Current treatments for Streptococcal infections include both antibiotics and prophylactic vaccination. Current vaccines, particularly with respect to GBS, suffer from poor immunogenicity, while the emergence of antibiotic resistant strains has lessened the effectiveness of currently used antibiotics. Accordingly, there is an increasing need for the development of new vaccines and antibiotics (as well as other small molecule bacterial inhibitors) to help prevent and treat Streptococcal infections.

[0013] Applicants have identified regions of the Streptococcal genomes which can be used to identify and develop new vaccines and treatments for Streptococcal infections. Specifically, Applicants have identified polynucleotides of the Streptococcal genome which are conserved or specific to Streptococcal species, species serotypes, and/or specific serotype isolates. These polynucleotides and their expressed polypeptides can be used to screen, develop and design new vaccines, antibiotics and other small molecule bacterial inhibitors. These polynucleotides and their expressed polypeptides can further be used to diagnose and identify Steptococcal infections.

### SUMMARY OF THE INVENTION

[0014] The invention relates to polynucleotides which are conserved or specific to one or more species of Streptococcus, Streptococcus species serotypes, and/or serotype isolates. In particular, the invention relates to polynucleotides from Streptococcus which are conserved or specific to one or more of the species of S. pneumoniae (“pneumococcus” or “S. pn.”), S. pyogenes (“group A streptococcus” or “GAS”), and S. agalactiae (“group B streptococcus” or “GBS”). The invention further relates to polynucleotides which are conserved or specific to one or more Streptococcal species serotypes, such as GBS serotypes Ia, Ib, II, III, IV, V, VI, VII, and VIII. The invention still further relates to polynucleotides which are conserved or specific to one or more clinical isolates of a Streptococcus species.

[0015] The invention is based on the identification of the following Subsets of genes. Genes falling within each subset are described with respect to referenced tables, lists, and/or figures (in particular the CGH map depicted in FIG. 1).

[0016] The following Subsets relate to the GBS genome:

[0017] GBS Subset 1: 1060 GBS genes which have homologs with GAS and with pneumococcus (Table 8);

[0018] GBS Subset 2: 225 GBS genes which have homologues with GAS, but not with pneumococcus (Table 10);

[0019] GBS Subset 3: 176 GBS genes which have homologues with pneumococcus but not with GAS (Table 9);

[0020] GBS Subset 4: 683 GBS genes which do not have homologues with GAS or pneumococcus (specific to GBS vs GAS and pneumococcus) (Table 11).

[0021] The invention is based on the identification of the following subsets of genes within the GAS genome:

[0022] GAS Subset 1: 1006 GAS genes which have homologues with GBS and with pneumococcus (Table 33);

[0023] GAS Subset 2: 212 GAS genes which have homologues with GBS but do not have homologues with pneumococcus (Table 34);

[0024] GAS Subset 3: 62 GAS genes which have homologues with pneumococcus but do not have homologues with GBS (Table 35);

[0025] GAS Subset 4: 416 GAS genes which do not have homologues with either GBS or pneumococcus. This Subset can be determined by subtracting the above subsets from the published genome.

[0026] The invention is based on the identification of the following subsets of genes within the pneumococcus genome:

[0027] Spn Subset 1: 1034 Spn genes which have homologues with GBS and GAS (Table 36);

[0028] Spn Subset 2: 195 Spn genes which have homologues with GBS but do not have homologues with GAS (Table 37);

[0029] Spn Subset 3: 74 Spn genes which have homologues with GAS but do not have homologues with GBS (Table 38);

[0030] Spn Subset 4: 836 Spn genes which do not have homologues with either GBS or pneumococcus. This Subset can be determined by substracting the above Subsets from the published genome.

[0031] The invention further provides polynucleotides which are conserved or specific to Streptococcus based on a comparison with a wide range of published bacterial genomes. The following additional Subsets are provided:

[0032] GBS Subset 1(a): Of the 1060 GBS genes which have homologues in both GAS and pneumococcus, 12 of those GBS genes do not have homologues with any of the other published bacterial genomes at the time of the invention (i.e., GBS Subset 1(a) is specific to Streptococcus vs non Streptococcus published genomes). (The 12 GBS ORF's are listed in Table 3).

[0033] GBS Subset 2(a): This Subset comprises GBS genes which have homologues with GAS, but not with pneumococcus or any other published bacterial genomes at the time of the invention.

[0034] GBS Subset 3(a): This Subset comprises GBS genes which have homologues with pneumococcus, but not with GAS or any other published bacterial genomes at the time of the invention.

[0035] GBS Subset 4(a): Of the 683 GBS genes which do not have homologues in either GAS or pnuemococcus, 315 of these GBS genes also do not have homologues with any of the other published bacterial genomes. These include six proteins predicted to be anchored on the cell wall (SAG0677, SAG0771, SAG1052, SAG1331, SAG1473, and SAG1168), three of the capsule-related genes (SAG1163, SAG1167, and SAG1168), six transcriptional regulators, and four genes of the cyl operon (SAG0663-SAG0673) essential for GBS hemolytic activity and production of pigment. See Pritzlaff et al. (2001) Mol. Microbiol., 39, 236-247. The rest of the 315 proteins include 240 hypothetical proteins with no similarity to other proteins in databases.

[0036] Many of the 315 genes specific to S. agalactiae are located in regions likely to constitute mobile genetic elements. Two of these regions resemble prophages (SAG0545-SAG0610 and SAG1835-SAG1885) displaying a mosaic structure with segments most similar to different bacteriophages, a pattern that suggests frequent recombination events. PblA and PblB are adhesins from a S. mitis prophage where they contribute to endocarditis by binding to human platelets (See Bensing, et al. (2001) Infect. Immun. 69, 6186-6192; Bensing, et al (2001) Infect. Immun. 69, 1373-1380. Their orthologs in S. agalactiae are located on separate prophages and display a different protein structure. Another region (SAG1247-SAG1299) encodes a putative conjugative transposon that carries genes for cadmium efflux and mercury resistance.

[0037] GAS Subset 1(a): This Subset comprises GAS genes which have homologues with GBS and with pneumococcus, but do not have homologues with any of the other published bacterial genomes at the time of the invention.

[0038] GAS Subset 2(a): This Subset comprises GAS genes which have homologues with GBS but do not have homologues with pneumococcus or any of the other published bacterial genomes at the time of the invention;

[0039] GAS Subset 3(a): This Subset comprises GAS genes which have homologues with pneumococcus but do not have homologues with GBS or any of the other published bacterial genomes at the time of the invention.

[0040] GAS Subset 4(a): This Subset comprises GAS genes which do not have homologues with either GBS or pneumococcus or with any of the other published bacterial genomes at the time of the invention.

[0041] Spn Subset 1(a): This Subset comprises Spn genes which have homologues with GBS and GAS but which do not have homologues with any of the other published bacterial genomes at the time of the invention;

[0042] Spn Subset 2(a): This Subset comprises Spn genes which have homologues with GBS but do not have homologues with GAS or with any of the other published bacterial genomes at the time of the invention;

[0043] Spn Subset 3(a): This Subset comprises Spn genes which have homologues with GAS but do not have homologues with GBS or with any of the other published bacterial genomes at the time of the invention;

[0044] Spn Subset 4(a): This Subset comprises Spn genes which do not have homologues with either GBS or pneumococcus or with any of the other published bacterial genomes at the time of the invention.

[0045] The invention also provides polynucleotides which are conserved or specific to GBS serotypes and/or clinical isolates. Applicants have sequenced 19 GBS genes from a variety of GBS serotypes in 11 different clinical isolates. The sequences of these genes and their alignments are set forth in Tables 13-31. Polynucleotide and polypeptide sequences which are specific or conserved across one or more clinical isolates can be identified using these alignments. The following additional subsets are provided:

[0046] GBS Subset 1(b): of the 1060 GBS genes which have homologues with GAS and with pneumococcus, 47 of these GBS genes vary among the 11 clinical isolates (GBS Subset 1(b)(i)). 1013 of these GBS genes are conserved across the 11 clinical isolates (GBS Subset 1(b)(ii)). These lists can be determined by comparing the genes listed in Table 8 with the Comparative Genome Hybridization in FIG. 1.

[0047] GBS Subset 2(b): of the 225 GBS genes which have homologues with GAS, but not pneumococcus, 44 of these GBS genes vary among the 11 clinical isolates (GBS Subset 2(b)(i)). 181 of these GBS genes are conserved across the 11 clinical isolates (GBS Subset 2(b)(ii)). These lists can be determined by comparing the genes listed in Table 10 with the Comparative Genome Hybridization in FIG. 1.

[0048] GBS Subset 3(b): of the 176 GBS genes which have homologues with pneumococcus, 44 of these GBS genes vary among 11 clinical isolates (GBS Subset 3(b)(i)). 132 of these GBS genes are conserved across the 11 clinical isolates (GBS Subset 3(b)(ii)). This list can be determined by comparing the genes listed in Table 9 with the Comparative Genome Hybridization in FIG. 1.

[0049] GBS Subset 4(b): of the 683 GBS genes which do not have homologues with GAS or pneumococcus, 260 GBS genes vary among the 11 clinical isolates (GBS Subset 4(b)(i)). 423 of these GBS genes are conserved across the 11 clinical isolates (GBS Subset 4(b)(ii)). This list can be determined by comparing the genes listed in Table 11 with the Comparative Genome Hybridization in FIG. 1. GBS Subset 4(b)(ii) also includes the GBS ORF's listed on Table 12 receiving a “+” under the column “GBS specific”.

[0050] An additional 63 GBS genes have been sequenced and compared in 2-11 clinical isolates. These sequences and their alignments are provided in Tables 40-89. Polynucleotide and polypeptide sequences which are specific or conserved across one or more clinical isolates can be identified using these alignments.

[0051] The invention further provides polynucleotides which are likely recent genomic duplications in GBS. These duplications include glycosyl transferases, sortases, proteins anchored on the cell wall, β lactam resistance factors, and many hypothetic proteins. The GBS genes are listed in Table 4 (GBS Subset 5).

[0052] The invention is also based on the identification of a cluster of 13 adjacent genes (SAG1410-SAG1424) which is believed to encode enzymes required for synthesis of the group B carbohydrate, a coplex multiantennary structure of rhamnose, glucitol phosphate, N-acetylglucosamine, and galactose. (GBS Subset 6). Predicted proteins encoded within this cluster include seven putative glycoslytransferases, four of which are similar to rhamnosyltransferases in other streptococcal species; a putative dTDP-L-rhamnose synthase; and proteins involved in glucitol synthesis. All nine regonized GBS capsular polysaccharide types contain sialic acid residues as part of their repeating unit structure, a feature that contributes to virulence by inhibitng activation of the alternative complement pathway. See Edwards et al. (1982) J. Immunol. 128, 1278-1283.

[0053] The type V capsular polysaccharide gene cluster consists of 18 genes. (GBS Subset 6(a)). A region of glycosyltransferases and related proteins (SAG1162-SAG1170) that direct the synthesis of the type V polysaccharide repeat unit is flanked on either side by genes that are conserved in all known GBS capsule serotypes. Downstream of this region are genes that encode enzynmes for the biosynthesis and activation of sialic acid (SAG1158-SAG1161). Upstream of the serotype specific region are genes (SAG1171-SAG1175) found not only in all nine GBS capsular serotypes but also in a variety of other polysaccharide-producing streptococci.

[0054] The invention is also based on the identification of GBS ORFs predicted to encode proteins carrying a signal peptide (GBS Subset 7). These GBS ORF's are listed in Table 2 receiving a “+” under the column “signal peptide”.

[0055] The invention is also based on the identification of GBS ORFs predicted to encode proteins which are anchored on the cell wall through an LPxTG motif (GBS Subset 8). These GBS ORF's are listed in Table 2 receiving a “+” under the column “sortase motif”.

[0056] The invention is also based on the identification of GBS ORFs prediced to encode lipoproteins (GBS Subset 9). These GBS ORF's are listed in Table 2 receiving a “+” under the column “lipoprotein”.

[0057] The invention is also based on the identification of two GBS ORF's predicted to encode enzymes related to metabolism (GBS Subset 10). These GBS ORFs include a putative pullulanase (SAG1216) and a neuraminidase-related protein (SAG1932).

[0058] The invention is also based on the identification of GBS ORF's predicted to encode proteins exposed on the cell surface (GBS Subset 11). These GBS ORF's are listed in Table 2 receiving a “+” under the column “FACS”.

[0059] The invention is also based on the identification of 401 GBS ORF's from GBS strain 2603 V/R which were not detected in at least one other of the 11 tested clinical isolates (GBS Subset 12). See Comparative Hybridization Genome in FIG. 1. 364 of these 401 ORF's correspond to 15 regions containing more than 5 contiguous genes. Each region is identified in FIG. 1 by numerical yellow bullets. Each region comprises a subset as defined below:

[0060] Region 1: GBS Subset 12(a). This region is unique to GBS (SAG0218-SAG0238). This region is a possible plasmid or remnant of a phage and contains mostly hypothetical proteins.

[0061] Region 2: GBS Subset 12(b)

[0062] Region 3: GBS Subset 12(c)

[0063] Region 4: GBS Subset 12(d)

[0064] Region 5: GBS Subset 12(e)

[0065] Region 6: GBS Subset 12(f)

[0066] Region 7: GBS Subset 12(g)

[0067] Region 8: GBS Subset 12(h). This region is specific to GBS (SAG1018-SAG1037). This regioncomprises 20 proteins of unknown function, most of which are predicted to be membrane associated or secreted, and displays an atypical nucleotide composition.

[0068] Region 9: GBS Subset 12(i)

[0069] Region 10: GBS Subset 12(j)

[0070] Region 11: GBS Subset 12(k)

[0071] Region 12: GBS Subset 12(l)

[0072] Region 13: GBS Subset 12(m)

[0073] Region 14: GBS Subset 12(n). This region is unique to GBS and spans 33 genes (SAG1989-2021), including 25 proteins of unknown function, some of which carry a cell-wall anchor.

[0074] Region 15: GBS Subset 12(o).

[0075] This invention is also based on identification of clusters of GBS genes as set forth in FIG. 5 and Table 6. In FIG. 5, the presence of a particular gene or gene cluster is indicated in the figure by a red square and the absence of a gene or cluster by a black square. The relationship between strains based on this analysis is depicted by the tree at the top of the figure. The strains and their serotypes are indicated (NT: nontypeable). Clusters with identical profiles are reduced to a single horizontal line and the number of genes in each cluster is indicated on the right. The clusters of 5 or more genes, labeled in red text and numbered, are listed in Table 6. The 1698 genes shared by all 19 strains are labeled in green text. Applicants identified the following subsets:

[0076] GBS Subset 13 (a): Cluster 1 (from Table 6).

[0077] GBS Subset 13 (b): Cluster 2 (from Table 6).

[0078] GBS Subset 13 (c): Cluster 3 (from Table 6).

[0079] GBS Subset 13 (d): Cluster 4 (from Table 6).

[0080] GBS Subset 13 (e): Cluster 5 (from Table 6).

[0081] GBS Subset 13 (f): Cluster 6 (from Table 6).

[0082] GBS Subset 13 (g): Cluster 7 (from Table 6).

[0083] GBS Subset 13 (h): Cluster 8 (from Table 6).

[0084] GBS Subset 13 (i): Cluster 9 (from Table 6).

[0085] GBS Subset 13 (j): Cluster 10 (from Table 6).

[0086] GBS Subset 13 (k): Cluster 11 (from Table 6).

[0087] GBS Subset 13 (l): Cluster 12 (from Table 6).

[0088] GBS Subset 13 (m): Cluster 13 (from Table 6).

[0089] GBS Subset 13 (n): Cluster 14 (from Table 6).

[0090] GBS Subset 13 (o): Cluster 15 (from Table 6).

[0091] GBS Subset 13 (p): Cluster 16 (from Table 6).

[0092] GBS Subset 13 (q): 1698 ORFs shared by all strains.

[0093] The invention is also based on the identification of the polynucleotide sequences of 82 genes from up to 11 different GBS strains. 19 of these genes are listed on Table 7. A further GBS Subset 14 includes this set of polynucleotide sequences from the 11 strains and their encoded polypeptide sequences. In particular, GBS Subset 14 contains a Subset of polynucleotide fragments of 10 or more contiguous polynucleotides which are conserved between two or more strains (GBS Subset 14(a)). GBS Subset 14 further includes a Subset of polynucleotide fragments of 15 or more contiguous polynucleotides which are conserved between two or more strains (GBS Subset 14(b)). GBS Subset 14 further includes a Subset of polynucleotide fragments of 10 or more contiguous polynucleotides which are conserved between three or more strains (GBS Subset 14(c)). GBS Subset 14 further includes a Subset of polynucleotide fragments of 10 or more contiguous polynucleotides which are conserved between four or more strains (GBS Subset 14(d)).

[0094] GBS Subset 14 further includes a Subset of polypeptide fragments of 5 or more contiguous amino acids which are conserved between in two or more strains (GBS Subset 14(e)). GBS Subset 14 further includes a Subset of polypeptide fragments of 5 or more contiguous amino acids which are conserved between three or more strains (GBS Subset 14(f)). GBS Subset 14 further includes a Subset of polypeptide fragments of 5 or more contiguous amino acids which are conserved between four or more strains (GBS Subset 14(g)). GBS Subset 14 further includes a Subset of polypeptide fragments of 10 or more contiguous amino acids which are conserved across two or more strains (GBS Subset 14(h)).

[0095] The invention provides for methods of screening a Streptococcal genome for a conserved or a specific genomic sequence using one or more of the Subsets of the invention.

[0096] The invention further provides for an immunogenic composition comprising a polypeptide expressed by one or more of the polynucleotides in one or more of the Subsets of the invention, and methods for designing an immunogenic composition by selecting one or more polypeptides expressed by one or more of the polynucleotides in one or more of the Subsets of the invention. Preferably, the immunogenic compositions of the invention comprise at least two, three, four or five polypeptides encoded by polynucleotides within the same Subset.

[0097] The invention further provides for methods of screening compounds for activity against a Streptococcal bacteria, which method comprises contacting the compounds with a polypeptide expressed by the polynucleotide from one of the Subsets of the invention.

[0098] The invention further provides for compositions comprising one or more of the polynucleotides, and fragments thereof, selected from the group consisting of the sequences set forth in Tables 13-31 or 40-89.

[0099] The invention further provides for compositions comprising polypeptides and fragments thereof encoded by the polynucleotides set forth in Tables 13-31 or 40-89.

[0100] The invention provides for compositions comprising polypeptides and fragments thereof set forth in Tables 13-31 or 40-89.

### BRIEF DESCRIPTION OF THE TABLES AND DRAWINGS

[0101] Table 1 comprises a complete list of GBS predicted genes, listed by SAGxxxx ORF number. The SAGxxxx ORF number corresponds to the genomic sequence for the Streptococcus agalactiae type V strain 2603 V/R available either at the TIGR website by Aug. 28, 2002 at http://www.tigr.org or at the GenBank database at accession number AE009948. This table also includes the predicted amino acid size of the predicted expressed protein and the predicted function, if known.

[0102] Table 2 comprises a list of predicted and experimentally characterized surface and secreted proteins from GBS. The SAGxxxx ORF number corresponds to the genomic sequence for the Streptococcus agalactiae type V strain 2603 V/R available either at the TIGR website by Aug. 28, 2002 at http://www.tigr.org or at the GenBank database at accession number AE009948.

[0103] Table 3 lists GBS genes which were shared among GBS, GAS and pneumococcus, but which were not found in any of the other completely sequenced genomes. The SAGxxxx ORF number corresponds to the genomic sequence for the Streptococcus agalactiae type V strain 2603 V/R available either at the TIGR website by Aug. 28, 2002 at http://www.tigr.org or at the GenBank database at accession number AE009948.

[0104] Table 4 depicts GBS genes which are predicted to have been recently duplicated within the genome. The SAGxxxx ORF number corresponds to the genomic sequence for the Streptococcus agalactiae type V strain 2603 V/R available either at the TIGR website by Aug. 28, 2002 at http://www.tigr.org or at the GenBank database at accession number AE009948.

[0105] Table 5 lists the 19 GBS strains used for comparative genome hybridisations and phylogenetic analysis.

[0106] Table 6 lists clusters of GBS genes derived from phylogenetic profiling of GBS strains based on comparative genome hybridisations. The SAGxxxx ORF number corresponds to the genomic sequence for the Streptococcus agalactiae type V strain 2603 V/R available either at the TIGR website by Aug. 28, 2002 at http://www.tigr.org or at the GenBank database at accession number AE009948.

[0107] Table 7 lists the GBS genes used for phylogenetic analyses of the 19 GBS strains. The SAGxxxx ORF number corresponds to the genomic sequence for the Streptococcus agalactiae type V strain 2603 V/R available either at the TIGR website by Aug. 28, 2002 http://www.tigr.org or at the GenBank database at accession number AE009948.

[0108] Table 8 lists the 1060 GBS ORF's which are shared with GAS and pneumococcus. The ORFxxxxx reference number can be translated to SAGxxxx ORF number by using Table 32. The SAGxxxx ORF number corresponds to the genomic sequence for the Streptococcus agalactiae type V strain 2603 V/R available either at the TIGR website by Aug. 28, 2002 at http://www.tigr.org or at the GenBank database at accession number AE009948.

[0109] Table 9 lists the 176 GBS ORF's which are shared with pneumococcus but which are not homologous to a GAS gene. The ORFxxxxx reference number can be translated to SAGxxxx ORF number by using Table 32. The SAGxxxx ORF number corresponds to the genomic sequence for the Streptococcus agalactiae type V strain 2603 V/R available either at the TIGR website by Aug. 28, 2002 at http://www.tigr.org or at the GenBank database at accession number AE009948.

[0110] Table 10 lists the 225 GBS ORF's which are shared with GAS but which are not homologous with a pnuemococcus gene. The ORFxxxxx reference number can be translated to SAGxxxx ORF number by using Table 32. The SAGxxxx ORF number corresponds to the genomic sequence for the Streptococcus agalactiae type V strain 2603 V/R available either at the TIGR website by Aug. 28, 2002 at http://www.tigr.org or at the GenBank database at accession number AE009948.

[0111] Table 11 lists 683 GBS ORF's which are not shared with either GAS or pneumococcus. The ORFxxxxx reference number can be translated to SAGxxxx ORF number by using Table 32. The SAGxxxx ORF number corresponds to the genomic sequence for the Streptococcus agalactiae type V strain 2603 V/R available either at the TIGR website by Aug. 28, 2002 at http://www.tigr.org or at the GenBank database at accession number AE009948.

[0112] Table 12 lists 315 GBS ORF's which are not shared with GAS, pneumococcus or any other published genomic sequence. The ORFxxxxx reference number can be translated to SAGxxxx ORF number by using Table 32. The SAGxxxx ORF number corresponds to the genomic sequence for the Streptococcus agalactiae type V strain 2603 V/R available either at the TIGR website by Aug. 28, 2002 at http://www.tigr.org or at the GenBank database at accession number AE009948.

[0113] Table 13 lists the polynucleotide sequences of the 11 strains relating to GBS ORF SAG0466. An alignment of each of the sequences is also included.

[0114] Table 14 lists the polynucleotide sequences of the 11 strains relating to GBS ORF SAG0471. An alignment of each of the sequences is also included.

[0115] Table 15 lists the polynucleotide sequences of the 11 strains relating to GBS ORF SAG0492. An alignment of each of the sequences is also included.

[0116] Table 16 lists the polynucleotide sequences of the 11 strains relating to GBS ORF SAG0767. An alignment of each of the sequences is also included.

[0117] Table 17 lists the polynucleotide sequences of the 11 strains relating to GBS ORF SAG1086. An alignment of each of the sequences is also included.

[0118] Table 18 lists the polynucleotide sequences of the 11 strains relating to GBS ORF SAG1600. An alignment of each of the sequences is also included.

[0119] Table 19 lists the polynucleotide sequences of the 11 strains relating to GBS ORF SAG1680. An alignment of each of the sequences is also included.

[0120] Table 20 lists the polynucleotide sequences of the 11 strains relating to GBS ORF SAG1723. An alignment of each of the sequences is also included.

[0121] Table 21 lists the polynucleotide and polypeptide sequences of the 11 strains relating to GBS ORF SAG0079. An alignment of each of the sequences is also included.

[0122] Table 22 lists the polynucleotide and polypeptide sequences of the 11 strains relating to GBS ORF SAG0093. An alignment of each of the sequences is also included.

[0123] Table 23 lists the polynucleotide and polypeptide sequences of the 11 strains relating to GBS ORF SAG0163. An alignment of each of the sequences is also included.

[0124] Table 24 lists the polynucleotide and polypeptide sequences of the 11 strains relating to GBS ORF SAG0290. An alignment of each of the sequences is also included.

[0125] Table 25 lists the polynucleotide and polypeptide sequences of the 11 strains relating to GBS ORF SAG0368. An alignment of each of the sequences is also included.

[0126] Table 26 lists the polynucleotide and polypeptide sequences of the 11 strains relating to GBS ORF SAG0503. An alignment of each of the sequences is also included.

[0127] Table 27 lists the polynucleotide and polypeptide sequences of the 11 strains relating to GBS ORF SAG1473. An alignment of each of the sequences is also included.

[0128] Table 28 lists the polynucleotide and polypeptide sequences of the 11 strains relating to GBS ORF SAG1552. An alignment of each of the sequences is also included.

[0129] Table 29 lists the polynucleotide and polypeptide sequences of the 11 strains relating to GBS ORF SAG1641. An alignment of each of the sequences is also included.

[0130] Table 30 lists the polynucleotide and polypeptide sequences of the 11 strains relating to GBS ORF SAG2147. An alignment of each of the sequences is also included.

[0131] Table 31 lists the polynucleotide and polypeptide sequences of the 11 strains relating to GBS ORF SAG2148. An alignment of each of the sequences is also included.

[0132] Table 32 provides a conversion table for the ORFxxxx reference numbers to the SAGxxxx reference numbers. The SAGxxxx ORF number corresponds to the genomic sequence for the Streptococcus agalactiae type V strain 2603 V/R available either at the TIGR website by Aug. 28, 2002 at http://www.tigr.org or at the GenBank database at accession number AE009948.

[0133] Table 33 lists the 1006 GAS ORF's which are shared with GBS and Spn. The sequences corresponding to these ORFs were published in GenBank, Accession No. AAK33146 (protein sequence). A link to the corresponding polynucleotide sequence is also available. The numbers for the GAS ORF refer directly to their GenBank entries.

[0134] Table 34 lists the 212 GAS ORF's which are shared with GBS but which do not have homologues with pneumococcus. The sequences corresponding to these ORFs were published in GenBank, Accession No. AAK33146 (protein sequence). A link to the corresponding polynucleotide sequence is also available. The numbers for the GAS ORF refer directly to their GenBank entries.

[0135] Table 35 lists the 62 GAS ORF's which have homologues with pneumococcus but which do not have homologues with GBS. The sequences corresponding to these ORFs were published in GenBank, Accession No. AAK33146 (protein sequence). A link to the corresponding polynucleotide sequence is also available. The numbers for the GAS ORF refer directly to their GenBank entries.

[0136] Table 36 lists the 1034 Spn ORF's which are shared with GBS and GAS. These ORF's were published in GenBank. The numbers for Spn correspond to the entry for AE005672.

[0137] Table 37 lists the 195 Spn ORF's which are shared with GBS but do not have homologues with GAS. These ORF's were published in GenBank. The numbers for Spn correspond to the entry for AE005672.

[0138] Table 38 lists the 74 Spn ORF's which are shared with GAS but do not have homologues with GBS. These ORF's were published in GenBank. The numbers for Spn correspond to the entry for AE005672.

[0139] Table 40 lists the polynucleotide and polypeptide sequences of 8 strains relating to GBS ORF SAG0635. An alignment of the polynucleotide and polypeptide sequences is also included.

[0140] Table 41 lists the polynucleotide and polypeptide sequences of 8 strains relating to GBS ORF SAG0649. An alignment of the polynucleotide and polypeptide sequences is also included.

[0141] Table 42 lists the polynucleotide and polypeptide sequences of 10 strains relating to GBS ORF SAG0764. An alignment of the polynucleotide and polypeptide sequences is also included.

[0142] Table 43 lists the polynucleotide and polypeptide sequences of 10 strains relating to GBS ORF SAG0079. An alignment of the polynucleotide and polypeptide sequences is also included.

[0143] Table 44 lists the polynucleotide and polypeptide sequences of 10 strains relating to GBS ORF SAG0416. An alignment of the polynucleotide and polypeptide sequences is also included.

[0144] Table 45 lists the polynucleotide and polypeptide sequences of 5 strains relating to GBS ORF SAG1404. An alignment of the polynucleotide and polypeptide sequences is also included.

[0145] Table 46 lists the polynucleotide and polypeptide sequences of 10 strains relating to GBS ORF SAG1615. An alignment of the polynucleotide and polypeptide sequences is also included.

[0146] Table 47 lists the polynucleotide and polypeptide sequences of 10 strains relating to GBS ORF SAG0739. An alignment of the polynucleotide and polypeptide sequences is also included.

[0147] Table 48 lists the polynucleotide and polypeptide sequences of 10 strains relating to GBS ORF SAG1474. An alignment of the polynucleotide and polypeptide sequences is also included.

[0148] Table 49 lists the polynucleotide and polypeptide sequences of 10 strains relating to GBS ORF SAG1502. An alignment of the polynucleotide and polypeptide sequences is also included.

[0149] Table 50 lists the polynucleotide and polypeptide sequences of 2 strains relating to GBS ORF SAG1024. An alignment of the polynucleotide and polypeptide sequences is also included.

[0150] Table 51 lists the polynucleotide and polypeptide sequences of 7 strains relating to GBS ORF SAG0677. An alignment of the polynucleotide and polypeptide sequences is also included.

[0151] Table 52 lists the polynucleotide and polypeptide sequences of 10 strains relating to GBS ORF SAG1823. An alignment of the polynucleotide and polypeptide sequences is also included.

[0152] Table 53 lists the polynucleotide and polypeptide sequences of 10 strains relating to GBS ORF SAG0755. An alignment of the polynucleotide and polypeptide sequences is also included.

[0153] Table 54 lists the polynucleotide and polypeptide sequences of 10 strains relating to GBS ORF SAG0949. An alignment of the polynucleotide and polypeptide sequences is also included.

[0154] Table 55 lists the polynucleotide and polypeptide sequences of 10 strains relating to GBS ORF SAG1592. An alignment of the polynucleotide and polypeptide sequences is also included.

[0155] Table 56 lists the polynucleotide and polypeptide sequences of 10 strains relating to GBS ORF SAG0806. An alignment of the polynucleotide and polypeptide sequences is also included.

[0156] Table 57 lists the polynucleotide and polypeptide sequences of 10 strains relating to GBS ORF SAG1488. An alignment of the polynucleotide and polypeptide sequences is also included.

[0157] Table 58 lists the polynucleotide and polypeptide sequences of 10 strains relating to GBS ORF SAG0182. An alignment of the polynucleotide and polypeptide sequences is also included.

[0158] Table 59 lists the polynucleotide and polypeptide sequences of 10 strains relating to GBS ORF SAG2147. An alignment of the polynucleotide and polypeptide sequences is also included.

[0159] Table 60 lists the polynucleotide and polypeptide sequences of 10 strains relating to GBS ORF SAG1945. An alignment of the polynucleotide and polypeptide sequences is also included.

[0160] Table 61 lists the polynucleotide and polypeptide sequences of 2 strains relating to GBS ORF SAG1030. An alignment of the polynucleotide and polypeptide sequences is also included.

[0161] Table 62 lists the polynucleotide and polypeptide sequences of 10 strains relating to GBS ORF SAG0690. An alignment of the polynucleotide and polypeptide sequences is also included.

[0162] Table 63 lists the polynucleotide and polypeptide sequences of 10 strains relating to GBS ORF SAG1912. An alignment of the polynucleotide and polypeptide sequences is also included.

[0163] Table 64 lists the polynucleotide and polypeptide sequences of 10 strains relating to GBS ORF SAG0827. An alignment of the polynucleotide and polypeptide sequences is also included.

[0164] Table 65 lists the polynucleotide and polypeptide sequences of 8 strains relating to GBS ORF SAG0231. An alignment of the polynucleotide and polypeptide sequences is also included.

[0165] Table 66 lists the polynucleotide and polypeptide sequences of 10 strains relating to GBS ORF SAG0754. An alignment of the polynucleotide and polypeptide sequences is also included.

[0166] Table 67 lists the polynucleotide and polypeptide sequences of 10 strains relating to GBS ORF SAG0475. An alignment of the polynucleotide and polypeptide sequences is also included.

[0167] Table 68 lists the polynucleotide and polypeptide sequences of 10 strains relating to GBS ORF SAG0499. An alignment of the polynucleotide and polypeptide sequences is also included.

[0168] Table 69 lists the polynucleotide and polypeptide sequences of 10 strains relating to GBS ORF SAG0032. An alignment of the polynucleotide and polypeptide sequences is also included.

[0169] Table 70 lists the polynucleotide and polypeptide sequences of 2 strains relating to GBS ORF SAG1280. An alignment of the polynucleotide and polypeptide sequences is also included.

[0170] Table 71 lists the polynucleotide and polypeptide sequences of 10 strains relating to GBS ORF SAG1333. An alignment of the polynucleotide and polypeptide sequences is also included.

[0171] Table 72 lists the polynucleotide and polypeptide sequences of 10 strains relating to GBS ORF SAG0941. An alignment of the polynucleotide and polypeptide sequences is also included.

[0172] Table 73 lists the polynucleotide and polypeptide sequences of 10 strains relating to GBS ORF SAG0981. An alignment of the polynucleotide and polypeptide sequences is also included.

[0173] Table 74 lists the polynucleotide and polypeptide sequences of 10 strains relating to GBS ORF SAG1572. An alignment of the polynucleotide and polypeptide sequences is also included.

[0174] Table 75 lists the polynucleotide and polypeptide sequences of 10 strains relating to GBS ORF SAG0671. An alignment of the polynucleotide and polypeptide sequences is also included.

[0175] Table 76 lists the polynucleotide and polypeptide sequences of 10 strains relating to GBS ORF SAG0260. An alignment of the polynucleotide and polypeptide sequences is also included.

[0176] Table 77 lists the polynucleotide and polypeptide sequences of 10 strains relating to GBS ORF SAG2059. An alignment of the polynucleotide and polypeptide sequences is also included.

[0177] Table 78 lists the polynucleotide and polypeptide sequences of 10 strains relating to GBS ORF SAG1016. An alignment of the polynucleotide and polypeptide sequences is also included.

[0178] Table 79 lists the polynucleotide and polypeptide sequences of 10 strains relating to GBS ORF SAG2150. An alignment of the polynucleotide and polypeptide sequences is also included.

[0179] Table 80 lists the polynucleotide and polypeptide sequences of 2 strains relating to GBS ORF SAG1266. An alignment of the polynucleotide and polypeptide sequences is also included.

[0180] Table 81 lists the polynucleotide and polypeptide sequences of 10 strains relating to GBS ORF SAG0011. An alignment of the polynucleotide and polypeptide sequences is also included.

[0181] Table 82 lists the polynucleotide and polypeptide sequences of 10 strains relating to GBS ORF SAG0165. An alignment of the polynucleotide and polypeptide sequences is also included.

[0182] Table 83 lists the polynucleotide and polypeptide sequences of 10 strains relating to GBS ORF SAG0108. An alignment of the polynucleotide and polypeptide sequences is also included.

[0183] Table 84 lists the polynucleotide and polypeptide sequences of 10 strains relating to GBS ORF SAG0267. An alignment of the polynucleotide and polypeptide sequences is also included.

[0184] Table 85 lists the polynucleotide and polypeptide sequences of 10 strains relating to GBS ORF SAG1361. An alignment of the polynucleotide and polypeptide sequences is also included.

[0185] Table 86 lists the polynucleotide and polypeptide sequences of 10 strains relating to GBS ORF SAG1393. An alignment of the polynucleotide and polypeptide sequences is also included.

[0186] Table 87 lists the polynucleotide and polypeptide sequences of 8 strains relating to GBS ORF SAG0645. An alignment of the polynucleotide and polypeptide sequences is also included.

[0187] Table 88 lists the polynucleotide and polypeptide sequences of 10 strains relating to GBS ORF SAG0477. An alignment of the polynucleotide and polypeptide sequences is also included.

[0188] Table 89 lists the polynucleotide and polypeptide sequences of 10 strains relating to GBS ORF SAG1350. An alignment of the polynucleotide and polypeptide sequences is also included.

[0189] FIG. 1 is a circular representation of the GBS genome and comparative hybridisations using microarrays. A color version of FIG. 1 can be found in Tettelin et al., PNAS (2002) 99(19): 12391-12396 and online at www.pnas.org.

[0190] FIG. 2 is a schematic representation of in silico comparisons between streptococci. A color version of FIG. 2 can be found in Tettelin et al., PNAS (2002) 99(19): 12391-12396 and online at www.pnas.org.

[0191] FIG. 3 depicts a phylogenetic tree of GBS strains based on PCR sequences.

[0192] FIG. 4 depicts a linear representation of the GBS genome. A color version of FIG. 4 can be found in the supporting information to Tettelin et al., PNAS (2002) 99(19): 12391-12396 available online at www.pnas.org.

[0193] FIG. 5 demonstrates phylogenetic profiling of GBS strains based on comparative genome hybridisations. A color version of FIG. 5 can be found in the supporting information to Tettelin et al., PNAS (2002) 99(19):12391-12396 available online at www.pnas.org.

### DETAILED DESCRIPTION OF THE INVENTION

[0194] The invention relates to polynucleotides which are conserved or specific to one or more species of Streptococcus, Streptococcus species serotypes, and/or serotype isolates. In particular, the invention relates to polynucleotides from Streptococcus which are conserved or specific to one or more of the species of S. pneumoniae (“pneumococcus” or “S. pn.”), S. pyogenes (“group A streptococcus” or “GAS”), and S. agalactiae (“group B streptococcus” or “GBS”). The invention further relates to polynucleotides which are conserved or specific to one or more Streptococcal species serotypes, such as GBS serotypes Ia, Ib, II, III, IV, V, VI, VII, and VIII. The invention still further relates to polynucleotides which are conserved or specific to one or more clinical isolates of a Streptococcus species.

[0195] In order to facilitate an understanding of the invention, selected terms used in the application will be discussed below.

[0196] As used herein, the phrase “species of Streptococcus” generally refers to species of the Streptoccus family, including S.pneumoniae (“pneumococcus” or “S.pn.”), S.pyogenes (‘group A streptococcus’ or ‘GAS’) and S.agalactiae (‘group B streptococcus’ or ‘GBS’).

[0197] As used herein, the phrase “Streptococcus species serotypes” generally refers to subdivisions based on a distinguishing characteristic within a specific Streptococcus species. The distinguishing characteristic can be identified by any of a wide range of diagnostic tools. For instance, GBS is generally recognized as comprising at least nine subdividing serotypes based on the structure of their polysaccharide capsule.

[0198] As used herein, the phrases “serotype isolates” or “clinical isolates” generally refer to specific isolated bacterial strains of a specific Streptococcal species and serotype.

[0199] As used herein in reference to bacterial genomes, the phrases “conserved” or “shared” generally refer to genomic sequences which have homologues in the two or more genomes in the reference. Homology references, as used in this application, are generally based on comparisons using FASTA3. See Pearson (2000)Methods Mol. Biol. 132 185-219. When the homology reference involves a comparison between genes in GBS, GAS or Spn, homologous or shared genes are typically defined by using a FASTA3 P value cutoff of 10⁻¹⁵. Where the homology reference involves a comparison between GBS, GAS or Spn and all other completely sequenced genomes, homologous or shared genes are typically defined by using a FASTA3 P value cutoff of 10⁻⁵ or lower.

[0200] As used herein in reference to bacterial genomes, the phrases “specific to” or “not shared” generally refer to genomic sequences which do not have homologues in the two or more genomes in the reference.

[0201] Other software programs to compare identity and to determine homology between nucleotide sequences are known in the art, for example those described in section 7.7.18 of Current Protocols in Molecular Biology (F. M. Ausubel et al., eds., 1987) Supplement 30. A preferred alignment program is GCG Gap (Genetics Computer Group, Wisconsin, Suite Version 10.1), preferably using default parameters, which are as follows: open gap=3; extend gap=1.

[0202] Sequences within a Subset of the invention include sequences which hybridize to the listed genes. Hybridization reactions can be performed under conditions of different “stringency”. Conditions that increase stringency of a hybridization reaction of widely known and published in the art [e.g. page 7.52 of Sambrook et al. (1989) Molecular Cloning: A Laboratory Manual. NY, Cold Spring Harbor Laboratory]. Examples of relevant conditions include (in order of increasing stringency): incubation temperatures of 25° C., 37° C., 50° C., 55° C. and 68° C.; buffer concentrations of 10×SSC, 6×SSC, 1×SSC, 0.1×SSC (where SSC is 0.15 M NaCl and 15 mM citrate buffer) and their equivalents using other buffer systems; formamide concentrations of 0%, 25%, 50%, and 75%; incubation times from 5 minutes to 24 hours; 1, 2, or more washing steps; wash incubation times of 1, 2, or 15 minutes; and wash solutions of 6×SSC, 1×SSC, 0.1×SSC, or de-ionized water. Hybridization techniques and their optimization are well known in the art [e.g see Sambrook et al.; RNA Methodologies (Farrell, 1998) (Academic Press; ISBN 0-12-249695-7); Current Protocols in Molecular Biology (F. M. Ausubel et al., eds., 1987) Supplement 30; Short protocols in molecular biology (4th edition, 1999) Ausubel et al. eds. ISBN 0-471-32938-X; U.S. Pat. No. 5,707,829 etc.].

[0203] Identity between polypeptide sequences can be determined using software programs known in the art, for example those described in section 7.7.18 of Current Protocols in Molecular Biology (F. M. Ausubel et al., eds., 1987) Supplement 30. A preferred alignment is determined by the Smith-Waterman homology search algorithm [Smith & Waterman (1981) Adv. Appl. Math. 2: 482-489.] using an affine gap search with a gap open penalty of 12 and a gap extension penalty of 2, BLOSUM matrix 62.

[0204] Typically, 50% identity or more between two proteins may be considered to be an indication of functional equivalence. References to a percentage sequence identity between two amino acid sequences means that, when aligned, that percentage of amino acids are the same in comparing the two sequences.

[0205] The terms “polypeptide”, “protein” and “amino acid sequence” as used herein generally refer to a polymer of amino acid residues and are not limited to a minimum length of the product. Thus, peptides, oligopeptides, dimers, mulimers, and the like, are included within the definition. Both fill-length proteins and fragments thereof are encompassed by the definition. Minimum fragments of polypeptides useful in the invention can be at least 3, 4, 5, 6, 7, 8, 9, 10, 11, 12, 13, 14, 15, 18, 20, 25, 30, 35, 40 or 50 amino acids. Typically, polypeptides useful in this invention can have a maximum length suitable for the intended application. Generally, the maximum length is not critical and can easily be selected by one skilled in the art.

[0206] Reference to polypeptides and the like also includes derivatives of the amino acid sequences of the invention. Such derivatives can include postexpression modifications of the polypeptide, for example, glycosylation, acetylation, phosphorylation, and the like. Amino acid derivatives can also include modifications to the native sequence, such as deletions, additions and substitutions (generally conservative in nature), so long as the protein maintains the desired activity. These modifications may be deliberate, as through site-directed mutagenesis, or may be accidental, such as through mutations of hosts which produce the proteins or errors due to PCR amplification. Furthermore, modifications may be made that have one or more of the following effects: reducing toxicity; facilitating cell processing (e.g., secretion, antigen presentation, etc.); and facilitating presentation to B-cells and/or T-cells.

[0207] A “recombinant” protein is a protein which has been prepared by recombinant DNA techniques as described herein. In general, the gene of interest is cloned and then expressed in transformed organisms, as described further below. The host organism expressed the foreign gene to produce the protein under expression conditions. The polypeptides of the invention may be prepared by recombinant means.

[0208] The term “polynucleotide”, as known in the art, generally refers to a nucleic acid molecule. A “polynucleotide” can include both double- and single-stranded sequences and refers to, but is not limited to, cDNA from viral, prokaryotic or eukaryotic MRNA, genomic RNA and DNA sequences from viral (e.g. RNA and DNA viruses and retroviruses) or prokaryotic DNA, and especially synthetic DNA sequences. The term also captures sequences that include any of the known base analogs of DNA and RNA, and includes modifications such as deletions, additions and substitutions (generally conservative in nature), to the native sequence, so long as the nucleic acid molecule encodes a therapeutic or antigenic protein. These modifications may be deliberate, as through site-directed mutagenesis, or may be accidental, such as through mutations of hosts that produce the antigens. Modifications of polynucleotides may have any number of effects including, for example, facilitating expression of the polypeptide product in a host cell.

[0209] The term “polynucleotide” further includes DNA, RNA, DNA/RNA hybrids, DNA and RNA analogues such as those containing modified backbones (with modifications in the sugar and/or phosphates e.g. phosphorothioates, phosphoramidites etc.), and also peptide nucleic acids (PNA) and any other polymer comprising purine and pyrimidine bases or other natural, chemically or biochemically modified, non-natural, or derivatized nucleotide bases etc. Nucleic acid according to the invention can be prepared in many ways (e.g. by chemical synthesis, from genomic or cDNA libraries, from the organism itself etc.) and can take various forms (e.g. single stranded, double stranded, vectors, probes etc.).

[0210] A polynucleotide can encode a biologically active (e.g., immunogenic or therapeutic) protein or polypeptide. Depending on the nature of the polypeptide encoded by the polynucleotide, a polynucleotide can include as little as 10 nucleotides, e.g., where the polynucleotide encodes an antigen. The polynucleotides of the invention may comprise at least 10, 13, 15, 18, 20, 22, 25, 30, 35, 40, 45, 50, 55, 60, 65, 70, 80, 90 or 100 consecutive polynucleotides.

[0211] By “isolated” is meant, when referring to a polynucleotide or a polypeptide, that the indicated molecule is separate and discrete from the whole organism with which the molecule is found in nature or, when the polynucleotide or polypeptide is not found in nature, is sufficiently free of other biological macromolecules so that the polynucleotide or polypeptide can be used for its intended purpose.

[0212] “Antibody” as known in the art includes one or more biological moieties that, through chemical or physical means, can bind to or associate with an epitope of a polypeptide of interest. The antibodies of the invention specifically bind to infectious prion conformations. The term “antibody” includes antibodies obtained from both polyclonal and monoclonal preparations, as well as the following: hybrid (chimeric) antibody molecules (see, for example, Winter et al. (1991) Nature 349: 293-299; and U.S. Pat. No. 4,816,567; F(ab′)₂ and F(ab) fragments; Fᵥ molecules (non-covalent heterodimers, see, for example, Inbar et al. (1972) Proc Natl Acad Sci USA 69:2659-2662; and Ehrlich et al. (1980) Biochem 19:4091-4096); single-chain Fv molecules (sFv) (see, for example, Huston et al. (1988) Proc Natl Acad Sci USA 85:5897-5883); dimeric and trimeric antibody fragment constructs; minibodies (see, e.g., Pack et al. (1992) Biochem 31:1579-1584; Cumber et al. (1992) J Immunology 149B: 120-126); humanized antibody molecules (see, for example, Riechmann et al. (1988) Nature 332:323-327; Verhoeyan et al. (1988) Science 239:1534-1536; and U.K. Patent Publication No. GB 2,276,169, published 21 Sep. 1994); and, any functional fragments obtained from such molecules, wherein such fragments retain immunological binding properties of the parent antibody molecule. The term “antibody” further includes antibodies obtained through non-conventional processes, such as phage display.

[0213] As used herein, the term “monoclonal antibody” refers to an antibody composition having a homogeneous antibody population. The term is not limited regarding the species or source of the antibody, nor is it intended to be limited by the manner in which it is made. Thus, the term encompasses antibodies obtained from murine hybridomas, as well as human monoclonal antibodies obtained using human rather than murine hybridomas. See, e.g., Cote, et al. Monoclonal Antibodies and Cancer Therapy, Alan R. Liss, 1985, p 77.

[0214] An “immunogenic composition” as used herein refers to a composition that comprises an antigenic molecule where administration of the composition to a subject results in the development in the subject of a humoral and/or a cellular immune response to the antigenic molecule of interest. The immunogenicity of the composition or the antigenicity of the molecule may be facilitated by the use of an adjuvant.

[0215] The practice of the present invention will employ, unless otherwise indicated, conventional methods of chemistry, biochemistry, molecular biology, immunology and pharmacology, within the skill of the art. Such techniques are explained fully in the literature. See, e.g., Remington's Pharmaceutical Sciences, 18th Edition (Easton, Pa.: Mack Publishing Company, 1990); Methods In Enzymology (S. Colowick and N. Kaplan, eds., Academic Press, Inc.); and Handbook of Experimental Immunology, Vols. I-IV (D. M. Weir and C. C. Blackwell, eds., 1986, Blackwell Scientific Publications); Sambrook, et al., Molecular Cloning: A Laboratory Manual (2nd Edition, 1989); Handbook of Surface and Colloidal Chemistry (Birdi, K. S. ed., CRC Press, 1997); Short Protocols in Molecular Biology, 4th ed. (Ausubel et al. eds., 1999, John Wiley & Sons); Molecular Biology Techniques: An Intensive Laboratory Course, (Ream et al., eds., 1998, Academic Press); PCR (Introduction to Biotechniques Series), 2nd ed. (Newton & Graham eds., 1997, Springer Verlag); Peters and Dalrymple, Fields Virology (2d ed), Fields et al. (eds.), B.N. Raven Press, New York, N.Y.

[0216] It is understood that the antibodies and methods of this invention are not limited to particular formulations or process parameters as such may, of course, vary. It is also to be understood that the terminology used herein is for the purpose of describing particular embodiments of the invention only, and is not intended to be limiting.

[0217] All publications, patents and patent applications cited herein are hereby incorporated by reference in their entirety.

Vaccines and Immunisation

[0218] The invention provides an immunogenic composition comprising a polypeptide, or a fragment thereof, which is encoded by a polynucleotide sequence which is conserved across one or more species of Streptococcus.

[0219] The polynucleotide is preferably conserved across one or more species of Streptococcus selected from the group consisting of GBS, GAS and pneumococcus. In one embodiment, the polynucleotide is a GBS polynucleotide which is homologous with at least one gene from both GAS and pneumococcus. Preferably, the GBS polynucleotide is selected from GBS Subset 1, which includes 1060 GBS genes which have homologues with both GAS and pneumococcus (Table 8).

[0220] In another embodiment, the polynucleotide is a GAS polynucleotide which is homologous with at least one gene from both GBS and pneumococcus. Preferably, the GAS polynucleotide is selected from GAS Subset 1, which includes 1006 GAS genes which have homologues with both GBS and pneumococcus.

[0221] In another embodiment, the polynucleotide is a pneumococcal polynucleotide which is homologous with at least one gene both GAS and GBS. Preferably, the pneumococcus polynucleotide is selected from Spn Subset 1, which includes 1034 pneumococcal genes which have homologous with both GBS and GAS.

[0222] In another embodiment, the polynucleotide is a GBS polynucleotide which is homologous with at least one gene from GAS. Preferably, the polynucleotide is selected from one of the genes listed GBS Subset 2, which includes 225 GBS genes which have homologues with GAS, but not with pneumococcus.

[0223] In another embodiment, the polynucleotide is a GBS polynucleotide which is homologous with at least one gene from pneumococcus. Preferably, the polynucleotide is selected from GBS Subset 3, which includes 176 GBS genes which have homologues with pneumococcus.

[0224] In another embodiment, the polynucleotide is a GAS polynucleotide which is homologous with at least one gene from GBS. Preferably, the polynucleotide is selected from GAS Subset 2, which includes 212 GAS genes which have a homologue with GBS.

[0225] In another embodiment, the polynucleotide is a GAS polynucleotide which is homologous with at least one gene from pneumoccus. Preferably, the polynucleotide is selected from GAS Subset 3, which includes 62 GAS genes which have a homologue with pneumococcus.

[0226] In another embodiment, the polynucleotide is a pneumococcus polynucleotide which is homologous with at least one gene from GBS. Preferably, the polynucleotide is selected from Spn Subset 2, which includes 195 Spn genes which have a homologue with GBS.

[0227] In another embodiment, the polynucleotide is a pneumococcus polynucleotide which is homologous with at least one gene from GAS. Preferably, the polynucleotide is selected from Spn Subset 3, which includes 74 Spn genes which have a homologue with GAS.

[0228] The invention further provides an immunogenic composition comprising a polypeptide, or a fragment thereof, which is encoded by a polynucleotide sequence which is specific to one or more species of Streptococcus.

[0229] The invention further provides an immunogenic composition comprising a polypeptide, or a fragment thereof, which is encoded by a polynucleotide which is specific to GBS, GAS and pneumococcus. In one embodiment, the polynucleotide is a GBS polynucleotide which is homologous to at least one gene from both GAS and pneumococcus. Preferably, the GBS polynucleotide is selected from GBS Subset 1. In an alternative embodiment, the polynucleotide is a GBS polynucleotide which is homologous to at least one gene from both GAS and pneumococcus, but which is not homologous to a gene in any other published bacterial genome at the time of the invention. Preferably, the GBS polynucleotide is selected from one of the 12 GBS genes included in GBS Subset 1(a). (Table 3).

[0230] In another embodiment, the polynucleotide is a GAS polynucleotide which is homologous to at least one gene in both GBS and pneumococcus. Preferably, the GAS polynucleotide is selected from GAS Subset 1. In another embodiment, the polynucleotide is a GAS polynucleotide which is homologous to at least one gene in both GBS and pneumococcus but which is not homologous to any gene in any other published bacterial genome at the time of the invention. Preferably, the GAS polynucleotide is selected from GAS Subset 1(a).

[0231] Alternatively, the polynucleotide is a pneumoccus polynucleotide which is homologous to at least one gene in both GBS and GAS. Preferably, the pneumococcus polynucleotide is selected from Spn Subset 1(a). In another embodiment, the polynucleotide is a pneumoccus polynucleotide which is homologous to at least one gene in both GBS and GAS but which does not have a homologue in any other published bacterial genome at the time of the invention. Preferably, the pneumococcus polynucleotide is selected from Spn Subset 1(a).

[0232] The invention further provides an immunogenic composition comprising a polypeptide, or a fragment thereof, which is encoded by a polynucleotide sequence which is specific to GBS. In one embodiment, the polynucleotide is a GBS polynucleotide which is not homologue to a gene in either GAS or pneumococcus. Preferably, the GBS polynucleotide is selected from one of the 683 GBS genes included in GBS Subset 4. In a further embodiment, the polynucleotide is a GBS polynucleotide which is not homologous to a gene in either GAS or pneumococcus or any other published bacterial genome at the time of the invention. Preferably, the GBS polynucleotide is selected from one of the 315 GBS genes in GBS Subset 4(a).

[0233] The invention further provides an immunogenic composition comprising a polypeptide, or a fragment thereof, which is encoded by a polynucleotide sequence which is specific to GAS. In one embodiment, the polynucleotide is a GAS polynucleotide which is not homologous to a gene in either GBS or pneumococcus. Preferably, the GBS polynucleotide is selected from one of the 416 GAS genes included in GAS Subset 4. In a further embodiment, the polynucleotide is a GAS polynucleotide which does not have a homologue in either GBS or pneumococcus or in any other published bacterial genome at the time of the invention. Preferably, the GAS polynucleotide is selected from GAS Subset 4(a).

[0234] The invention further provides an immunogenic composition comprising a polypeptide, or a fragment thereof, which is encoded by a polynucleotide sequence which is specific to pneumococcus. In one embodiment, the polynucleotide is a pneumococcus polynucleotide which is not homologous to a gene in either GBS or GAS. Preferably, the pneumococcus polynucleotide is selected from one of the 836 Spn genes included in Spn Subset 4. In a further embodiment, the polynucleotide is a pneumococcus polynucleotide which does not have a homologue in either GBS or GAS or in any other published bacterial genome at the time of the invention. Preferably, the pneumococcus polynucleotide is selected from Spn Subset 4(a).

[0235] The invention further provides an immunogenic composition comprising a polypeptide, or a fragment thereof, which is encoded by a polynucleotide sequence which is specific to GBS and GAS. In one embodiment, the polynucleotide is a GBS polynucleotide which is homologous to at least one gene from GAS but is not homologous to a gene from pneumococcus. Preferably, the GBS polynucleotide is selected from one of the 225 GBS genes included in GBS Subset 2. In another embodiment, the GBS polynucleotide is homologous to at least one gene from GAS but is not homologous to any gene from pneumococcus and does not have a homologue in any other published bacterial genome at the time of the invention. Preferably, the GBS polynucleotide is selected from GBS Subset 2(a).

[0236] In another embodiment, the polynucleotide is a GAS polynucleotide which is homologous to at least one gene from GBS but is not homologous to any gene from pneumococcus. Preferably, the GAS polynucleotide is selected from one of the 212 GAS genes included in GAS Subset 2. In another embodiment, the GAS polynucleotide is homologous to at least one gene from GBS but is not homologous to any gene from pneumococcus and does not have a homologous gene with any other published bacterial genome at the time of the invention. Preferably, the GAS polynucleotide is a selected from GAS Subset 2(a).

[0237] The invention further provides an immunogenic composition comprising a polypeptide, or a fragment thereof, which is encoded by a polynucleotide sequence which is specific to GBS and pneumococcus. In one embodiment, the polynucleotide is a GBS polynucleotide which is homologous to at least one gene from pneumococcus but is not homologous to any gene from GAS. Preferably, the GBS polynucleotide is selected from one of the 176 GBS genes included in GBS Subset 3. In another embodiment, the polynucleotide is a GBS polynucleotide which is homologous with at least one gene from pneumococcus but is not homologous with any GAS polynucleotide and does not have a homologous gene in any of the other published bacterial genomes at the time of the invention. Preferably, the GBS polynucleotide is selected from GBS Subset 3(a).

[0238] In another embodiment, the polynucleotide is a pneumococcus polynucleotide which is homologous with at least one gene from GBS, but is not homologous with any gene from GAS. Preferably, the pneumoccous polynucleotide is selected from one of the 195 Spn genes included in Spn Subset 2. In another embodiment, the polynucleotide is a pneumococcus polynucleotide which is homologous with at least one gene from GBS, but is not homologous with any gene from GAS and does not have a homologous gene in any other published bacterial genome at the time of the invention. Preferably, the pneumococcus polynucleotide is selected from Spn Subset 3(a).

[0239] The invention further provides an immunogenic composition comprising a polypeptide, or a fragment thereof which is encoded by a polynucleotide sequence which is specific to GAS and pneumococcus. In one embodiment, the polynucleotide is a GAS polynucleotide which is homologous with at least one gene from pneumococcus but is not homologous with any gene from GBS. Preferably, the GAS polynucleotide is selected from one of the 62 GAS genes included in GAS Subset 3. In another embodiment, the polynucleotide is a GAS polynucleotide which is homologous with at least one gene from pneumococcus but is not homologous with any gene from GBS and is not homologous with any gene of any published bacterial genome at the time of the invention. Preferably, the GAS polynucleotide is selected from GAS Subset 3(a).

[0240] In another embodiment, the polynucleotide is a pneumococcus polynucleotide which is homologous with at least one GAS polynucleotide, but is not homologous with any GBS gene. Preferably, the pneumoccous polynucleotide is selected from one of the 74 Spn genes included in Spn Subset 3. In another embodiment, the polynucleotide is a pneumococcus polynucleotide which is homologous with at least one gene from GAS, but is not homologous with any gene from GBS or with a gene from any other published bacterial genome at the time of the invention. Preferably, the pneumococcus polynucleotide is selected from Spn Subset 3(a).

[0241] The invention further provides an immunogenic composition comprising a polypeptide, or a fragment thereof, which is encoded by a polynucleotide sequence which is specific to one or more Streptococcal species serotypes. Preferably, the polynucleotide is specific to a Streptococcal species serotype selected from the Streptococcal species GBS, GAS and pneumococcus. More preferably, the polynucleotide is specific to one or more GBS serotypes selected from the group consisting of GBS serotype Ia, Ib, II, III, IV, V, VI, VII and VIII.

[0242] The invention further provides an immunogenic composition comprising a polypeptide, or a fragment thereof, which is encoded by a polynucleotide sequence which is conserved across one or more Streptococcal species serotypes. Preferably, the polynucleotide is specific to a Streptococcal species serotype selected from the Streptococcal species GBS, GAS and pneumococcus. More preferable, the polynucleotide is conserved across one or more GBS serotypes selected from the group consisting of GBS serotype Ia, Ib, II, III, IV, V, VI, VII and VIII.

[0243] The invention further provides an immunogenic composition comprising a polypeptide, or a fragment thereof, which is encoded by a polynucleotide sequence which is specific to one or more clinical isolates of a Streptococcal species. Preferably, the polynucleotide is specific to a Streptococcal species clinical isolate selected from the Streptococcal species GBS, GAS and pneumococcus. More preferably, the polynucleotide is specific to one or more GBS clinical isolates selected from the clinical isolates identified in Table 5. Still more preferably, the polynucleotide is specific to one or more GBS clinical isolates having one or more genes selected from the genes listed in Table 7.

[0244] In another embodiment, the polynucleotide is a GBS polynucleotide which is homologous to at least one gene from both GAS and pneumococcus and which varies among clinical isolates. In another embodiment, the polynucleotide is a GBS polynucleotide which is homologous to at least one gene from both GAS and pneumococcus and which is homologous with at least one gene from at least one of the clinical isolates identified in Table 5. In another embodiment, the polynucleotide is a GBS polynucleotide which is homologous to at least one gene from both GAS and pneumococcus and which is homologous with at least one gene from each of the clinical isolates identified in Table 5. Preferably, the polynucleotide is selected from one of the genes listed in Table 7.

[0245] In one embodiment, the polynucleotide is a GBS polynucleotide which is homologous to at least one gene from GAS and is not homologous to any gene from pneumococcus and which varies among clinical isolates. In another embodiment, the polynucleotide is a GBS polynucleotide which is homologous to at least one gene from GAS and is not homologous to any gene from pneumococcus and which is homologous to at least one gene from at least one of the clinical isolates identified in Table 5. In another embodiment, the polynucleotide is a GBS polynucleotide which is homologous to at least one gene from GAS and is not homologous to any gene from pneumococcus and which is homologous to at least one gene from each of the clinical isolates identified in Table 5. Preferably, the polynucleotide is selected from one of the genes listed in Table 7.

[0246] In one embodiment, the polynucleotide is a GBS polynucleotide which is homologous to at least one gene from pneumococcus and is not homologous to any gene from GAS and which varies among clinical isolates. In another embodiment, the polynucleotide is a GBS polynucleotide which is homologous to at least one gene from pneumococcus and is not homologous to any gene from GAS and which is homologous to at least one gene from at least one of the clinical isolates identified in Table 5. In another embodiment, the polynucleotide is a GBS polynucleotide which is homologous to at least one gene from pneumococcus and is not homologous to any gene from GAS and which is homologous to at least one gene from each of the clinical isolates identified in Table 5. Preferably, the polynucleotide is selected from one of the genes listed in Table 7.

[0247] In one embodiment, the polynucleotide is a GBS polynucleotide which is not homologous to any gene from GAS or pneumococcus and which varies among clinical isolates. In another embodiment, the polynucleotide is a GBS polynucleotide which is not homologous to any gene from GAS or pneumococcus and which is homologous to at least one gene from at least one of the clinical isolates identified in Table 5. In another embodiment, the polynucleotide is a GBS polynucleotide which is not homologous to any gene from GAS or pneumococcus and which is homologous to at least one gene from each of the clinical isolates identified in Table 5. Preferably, the polynucleotide is selected from one of the genes listed in Table 7.

[0248] The invention further provides an immunogenic composition comprising a polypeptide, or a fragment thereof, which is encoded by a polynucleotide sequence which is conserved across one or more clinical isolates of a Streptococcal species. Preferably, the polynucleotide is conserved across one or more Streptococcal clinical isolates selected from the Streptococcal species GBS, GAS and pneumococcus. More preferable, the polynucleotide is conserved across one or more GBS clinical isolates identified in Table 5. Still more preferably, the polynucleotide is conserved across one or more clinical isolates having one or more genes selected from the genes listed in Table 7.

[0249] The invention further provides for an immunogenic composition comprising a polypeptide, or a fragment thereof, encoded by a polynucleotide selected from one or more of the Subsets of the invention. Accordingly, the invention provides for an immunogenic composition comprising a polypeptide encoded by a polynucleotide selected from one or more of the following Subsets: GBS Subset 1, GBS Subset 2, GBS Subset 3, GBS Subset 4, GAS Subset 1, GAS Subset 2, GAS Subset 3, GAS Subset 4, Spn Subset 1, Spn Subset 2, Spn Subset 3, Spn Subset 4, GBS Subset 1(a), GBS Subset 2(a), GBS Subset 3(a), GBS Subset 4(a), GAS Subset 1(a), GAS Subset 2(a), GAS Subset 3(a), GAS Subset 4(a), Spn Subset 1(a), Spn Subset 2(a), Spn Subset 3(a), Spn Subset 4(a), GBS Subset 1(b), GBS Subset 2(b), GBS Subset 3(b), GBS Subset 4(b), GBS Subset 5, GBS Subset 6, GBS Subset 6(a), GBS Subset 7, GBS Subset 8, GBS Subset 9, GBS Subset 10, GBS Subset 11, GBS Subset 12, GBS Subset 12(a), GBS Subset 12(b), GBS Subset 12(c), GBS Subset 12(d), GBS Subset 12(e), GBS Subset 12(f), GBS Subset 12(g), GBS Subset 12(h), GBS Subset 12(i), GBS Subset 12(j), GBS Subset 12(k), GBS Subset 12(l), GBS Subset 12(m), GBS Subset 12(n), GBS Subset 12(o), GBS Subset 13(a), GBS Subset 13(b), GBS Subset 13(c), GBS Subset 13(d), GBS Subset 13(e), GBS Subset 13(f), GBS Subset 13(g), GBS Subset 13(h), GBS Subset 13(i), GBS Subset 13(j), GBS Subset 13(k), GBS Subset 13(l), GBS Subset 13(m), GBS Subset 13(n), GBS Subset 13(o), GBS Subset 13(p), GBS Subset 13(q), GBS Subset 14, GBS Subset 14(a), GBS Subset 14(b), GBS Subset 14(c), GBS Subset 14(d), GBS Subset 14(e), GBS Subset 14(f), GBS Subset 14(g), and GBS Subset 14(h).

[0250] The invention provides for an immunogenic composition comprising a polypeptide, or a fragment thereof, encoded by a polynucleotide selected from one or more of the following Subsets: GBS Subset 1, GBS Subset 2, GBS Subset 3, and GBS Subset 4.

[0251] The invention provides for an immunogenic composition comprising a polypeptide, or a fragment thereof, encoded by a polynucleotide selected from one or more of the following Subsets: GAS Subset 1, GAS Subset 2, GAS Subset 3, and GAS Subset 4.

[0252] The invention provides for an immunogenic composition comprising a polypeptide, or a fragment thereof, encoded by a polynucleotide selected from one or more of the following Subsets: Spn Subset 1, Spn Subset 2, Spn Subset 3, and Spn Subset 4.

[0253] The invention provides for an immunogenic composition comprising a polypeptide, or a fragment thereof, encoded by a polynucleotide selected from one or more of the following Subsets: GBS Subset 1(a), GBS Subset 2(a), GBS Subset 3(a), and GBS Subset 4(a).

[0254] The invention provides for an immunogenic composition comprising a polypeptide, or a fragment thereof, encoded by a polynucleotide selected from one or more of the following Subsets: GAS Subset 1(a), GAS Subset 2(a), GAS Subset 3(a), and GAS Subset 4(a).

[0255] The invention provides for an immunogenic composition comprising a polypeptide, or a fragment thereof, encoded by a polynucleotide selected from one or more of the following Subsets: Spn Subset 1(a), Spn Subset 2(a), Spn Subset 3(a), and Spn Subset 4(a).

[0256] The invention provides for an immunogenic composition comprising a polypeptide, or a fragment thereof, encoded by a polynucleotide selected from one or more of the following Subsets: GBS Subset 1(b), GBS Subset 2(b), GBS Subset 3(b), and GBS Subset 4(b).

[0257] The invention provides for an immunogenic composition comprising a polypeptide, or a fragment thereof, encoded by a polynucleotide selected from GBS Subset 5.

[0258] The invention provides for an immunogenic composition comprising a polypeptide, or a fragment thereof, encoded by a polynucleotide selected from one or more of the following Subsets: GBS Subset 6 and GBS Subset 6(a).

[0259] The invention provides for an immunogenic composition comprising a polypeptide, or a fragment thereof, encoded by a polynucleotide selected from one or more of the following Subsets: GBS Subset 7.

[0260] The invention provides for an immunogenic composition comprising a polypeptide, or a fragment thereof, encoded by a polynucleotide selected from one or more of the following Subsets: GBS Subset 8.

[0261] The invention provides for an immunogenic composition comprising a polypeptide, or a fragment thereof, encoded by a polynucleotide selected from one or more of the following Subsets: GBS Subset 9.

[0262] The invention provides for an immunogenic composition comprising a polypeptide, or a fragment thereof, encoded by a polynucleotide selected from one or more of the following Subsets: GBS Subset 10.

[0263] The invention provides for an immunogenic composition comprising a polypeptide, or a fragment thereof, encoded by a polynucleotide selected from one or more of the following Subsets: GBS Subset 11.

[0264] The invention provides for an immunogenic composition comprising a polypeptide, or a fragment thereof, encoded by a polynucleotide selected from one or more of the following Subsets: GBS Subset 12, GBS Subset 12(a), GBS Subset 12(b), GBS Subset 12(c), GBS Subset 12(d), GBS Subset 12(e), GBS Subset 12(f), GBS Subset 12(g), GBS Subset 12(h), GBS Subset 12(i), GBS Subset 12(j), GBS Subset 12(k), GBS Subset 12(l), GBS Subset 12(m), GBS Subset 12(n), and GBS Subset 12(o).

[0265] The invention provides for an immunogenic composition comprising a polypeptide, or a fragment thereof, encoded by a polynucleotide selected from one or more of the following Subsets: GBS Subset 13(a), GBS Subset 13(b), GBS Subset 13(c), GBS Subset 13(d), GBS Subset 13(e), GBS Subset 13(f), GBS Subset 13(g), GBS Subset 13(h), GBS Subset 13(i), GBS Subset 13(j), GBS Subset 13(k), GBS Subset 13(l), GBS Subset 13(m), GBS Subset 13(n), GBS Subset 13(o), GBS Subset 13(p), GBS Subset 13(q).

[0266] The invention provides for an immunogenic composition comprising a polypeptide or a fragment thereof encoded by a polynucleotide selected from one or more of the following Subsets: GBS Subset 14, GBS Subset 14(a), GBS Subset 14(b), GBS Subset 14(c), GBS Subset 14(d), GBS Subset 14(e), GBS Subset 14(f), GBS Subset 14(g), and GBS Subset 14(h).

[0267] Each of the above-identified groups and subsets may be used to create immunogenic compositions comprising two or more Streptococcus polypeptides. The invention then provides for an immunogenic composition comprising a combination of Streptococcus polypeptides, said combination consisting of two, three, four, five, six, seven, eight, nine, or ten polypeptides selected from one of the groups identified above. Preferably, the combination consists of two, three, four or five polypeptides. Preferably, the polypeptides are all selected from the same group. Preferably, the polypeptides are selected from the same Subset described herein. The Streptococcus polypeptides are selected from GBS, GAS and pneumococcus. Preferably, all of the polypeptides in the combination are selected from the same species.

[0268] For example, the composition may comprise an combination of GBS polypeptides, said combination consisting of two, three, four, five, six, seven, eight, nine, or ten polypeptides, wherein each polypeptide is encoded by a GBS polynucleotide sequence which is homologous to a polynucleotide sequence of both GAS and pneumococcus. Preferably, the combination consists of two, three, four or five polypeptides. Preferably, the GBS polynucleotide sequences are selected from GBS Subset 1.

[0269] As another example, the composition may comprise a combination of GBS polypeptides, said combination consisting of two, three, four or five polypeptides, wherein each polypeptide is encoded by a GBS polynucleotide sequence which is homologous to a polynucleotide sequence of GAS. Preferably, the GBS polynucleotide sequences are selected from GBS Subset 2.

[0270] The composition may comprise a combination of GBS polypeptides, said combination consisting of two, three, four or five polypeptides, wherein each polypeptide is encoded by a GBS polynucleotide sequence which is homologous to a polynucleotide sequence of Streptococcus pneumoniae. Preferably, the GBS polynucleotide sequences selected from GBS Subset 3.

[0271] The composition may comprise a combination of GBS polypeptides, said combination consisting of two, three, four or five polypeptides, wherein each polypeptide is encoded by a GBS serotype polynucleotide sequence which is homologous to at least one other GBS serotype. Preferably, the GBS polypeptides are encoded by GBS serotype polynucleotide sequences which are homologous to at least one other GBS serotype.

[0272] The invention further provides for an immunogenic composition comprising a polypeptide or a fragment thereof comprising a fusion protein encoded by one or more of the polynucleotides included in the Subsets of the invention.

[0273] The invention further provides a method for designing an immunogenic composition, such as a vaccine, by selecting one or more polypeptides encoded by a polynucleotide selected from one or more of the Subsets of the invention. Preferably, the immunogenic compositions of the invention comprise at least two, three, four or five polypeptides encoded by polynucleotides within the same Subset.

[0274] The invention provides a method for raising an immune response in a patient by administering any one of the immunogenic compositions set forth above. The choice of immunogenic composition means that the immune response may be reactive against all three of GAS, GBS and streptococcus, may be reactive against only two of the three, or may be reactive only against GBS.

[0275] Each of the immunogenic compositions described above may be prepared and administered instead as a polynucleotide where the polypeptide is expressed in vivo.

[0276] The immune response is preferably an antibody response. It may be a protective immune response. The patient is preferably a human.

[0277] The immunogenic compositions of the invention may further comprise an adjuvant, as discussed in further detail below.

Essential Genes and Knockouts

[0278] The invention provides a Streptococcus bacterium wherein one or more genes within any of the Subsets of this invention have been knocked out. The choice of Subset means that the knocked out gene may be, for instance, a gene found in GBS but not in GAS or pneumococcus (e.g. which is involved in the pathogenesis of GBS, but not in the pathogenesis of GAS or pneumococcus, such as binding GBS cellular targets).

[0279] Techniques for producing knockout bacteria are well known, and knockout Streptococci of various species have been reported [e.g. Margolis et al. (2001) Antimicrob. Agents Chemother. 45:2432-2435; Zhang et al. (2000) Cell 102:827-837; Nizet et al. (2000) Infect. Immun. 68:4245-4254; Nizet et al. (1997) Adv. Exp. Med. Biol. 418:627-630; etc.].

[0280] The knockout mutation may be situated in the coding region of the gene or may lie within its transcriptional control regions (e.g. within its promoter).

[0281] The knockout mutation will reduce the level of mRNA encoding the corresponding polypeptide to <1% of that produced by the wild-type bacterium, preferably <0.5%, more preferably <0.1%, and most preferably to 0%.

[0282] The knockout mutants of the invention may be used as immunogenic compositions (e.g. as vaccines) to prevent streptococcal infection. Such a vaccine may include the mutant as a live attenuated bacterium.

[0283] The knockout mutants of the invention may be used to determine whether genes are essential for bacterial survival, either under normal or stress conditions.

Antisense

[0284] The invention provides a single-stranded nucleic acid comprising a fragment of x₁ or more nucleotides from a nucleotide sequence selected from one of the Subsets of the invention. The choice of group means that the nucleic acid may be complementary to a gene sequence found in GBS, GAS and pneumococcus, or a gene sequence specific to GBS.

[0285] The single-stranded nucleic acid is at least x₁ nucleotides long. The value of x₁ is at least 7 (e.g. 8, 9, 10, 11, 12, 13, 14, 15, 16, 17, 18, 19, 20, 21, 22, 23, 24, 25, 26, 27, 28, 29, 30, 31, 32, 33, 34, 35, 36, 37, 38, 39, 40, 41, 42, 43, 44, 45, 46, 47, 48, 49, 50 etc.). The single-stranded nucleic acid may be at most x₂ nucleotides long, wherein x₂ is 100 or less (e.g. 99, 98, 97, 96, 95, 94, 93, 92, 91, 90, 89, 88, 87, 86, 85, 84, 83, 82, 81, 80, 79, 78, 77, 76, 75, 74, 73, 72, 71, 70, 69, 68, 67, 66, 65, 64, 63, 62, 61, 60).

[0286] The nucleic acid is preferably of the formula 5′-(N)ₐ—(X)—(N)_{b}-3′, wherein 0≧a≧15, 0≧b≧15, N is any nucleotide, and X is the fragment as defined above. The values of a and b may independently be 0, 1, 2, 3, 4, 5, 6, 7, 8, 9, 10, 11, 12, 13, 14 or 15. Each individual nucleotide N in the —(N)ₐ— and —(N)_{b}— portions of the nucleic acid may be the same or different. The length of the nucleic acid (i.e. a+b+x₁) is preferably x₂ or less.

[0287] Antisense inhibition of streptococcal gene expression is known e.g. Sato et al. (1998) FEMS Microbiol Lett 159:241-245. Antibacterial antisense techniques are also disclosed in international patent applications WO99/02673 and WO99/13893.

[0288] The single-stranded nucleic acid may reduce the level of polypeptide expression from the complementary gene to <1% of that produced by the wild-type bacterium, preferably <0.5%, more preferably <0.1%, and most preferably to 0%.

[0289] Antisense experiments may be used to determine whether genes are essential for bacterial survival, either under normal or stress conditions.

Screening Methods

[0290] The invention provides a method for screening compounds, wherein the method involves contacting the compounds with a polypeptide expressed by one or more of the polynucleotides selected from one of the Subsets of the invention. The method may be for screening for agonists of the polypeptides, antagonists, antibiotics etc. The choice of group means, for instance, that the method may be used for identifying an antibiotic with broad anti-streptococcal activity could be identified, or for identifying an antibiotic specific to GBS.

[0291] Potential compounds for screening include small organic molecules, peptides, peptoids, polypeptides, lipids, metals, nucleotides, nucleosides, aptamers, polyamines, antibodies, and derivatives thereof. Small organic molecules have a molecular weight between 50 and about 2,500 daltons, and most preferably in the range 200-800 daltons. Complex mixtures of substances, such as extracts containing natural products, compound libraries or the products of mixed combinatorial syntheses also contain potential antagonists.

[0292] Typically, a polypeptide is incubated with a test compound, and the mixture is then tested to see if the polypeptide and test compound interact, or to see if the polypeptide's activity is inhibited.

[0293] For preferred high-throughput screening methods, all the biochemical steps for this assay are performed in a single solution in, for instance, a test tube or microtitre plate, and the test compounds are analysed initially at a single compound concentration. For the purposes of high throughput screening, the experimental conditions are adjusted to achieve a proportion of test compounds identified as “positive” compounds from amongst the total compounds screened.

[0294] The invention also provides a compound identified using these methods. These can be used to treat or prevent streptococcal infection. The compound preferably has an affinity for the adhesion-specific protein of at least 10⁻⁷ M e.g. 10⁻⁸ M, 10⁻⁹ M, 10⁻¹⁰ M or tighter.

Distinguishing Streptococcal Species

[0295] The invention provides a method for determining whether a Streptococcus bacterium of interest is or is not in the species agalactiae, pyogenes or pneumoiae, comprising the step(s) of: (a) contacting the bacterium with a nucleic acid probe comprising the sequence of a gene selected from one of the Subsets of the invention; and/or (b) contacting the bacterium with an antibody which binds to a polypeptide encoded by one or more of the polynucleotides of one or more of the Subsets of the invention. The choice of group means, for instance, that the method may be used for distinguishing GBS from GAS and from pneumococcus, or for confirning that a bacterium is not a GAS or pneumococcus.

[0296] The method will typically include the further step of detecting the presence or absence of an interaction between the bacterium of interest and the nucleic acid or protein.

[0297] The bacterium of interest may be in a cell culture, for example, or may be within a biological sample believed or known to contain a streptococcus. It may be intact or may be, for instance, lysed.

[0298] The term “biological sample” encompasses a variety of sample types obtained from an organism and can be used in a diagnostic or monitoring assay. The term encompasses blood and other liquid samples of biological origin, solid tissue samples, such as a biopsy specimen or tissue cultures or cells derived therefrom and the progeny thereof. The term encompasses samples that have been manipulated in any way after their procurement, such as by treatment with reagents, solubilization, or enrichment for certain components. The term encompasses a clinical sample, and also includes cells in cell culture, cell supernatants, cell lysates, serum, plasma, biological fluids, and tissue samples.

GBS 2603 Type V Genomic Sequence

[0299] Applicants have sequenced the complete genome sequence of GBS clinical type V isolate 2603 V/R and performed comparative analyses comparing this sequence with other GBS strains, with other species of pathogenic Streptococci and with other known bacterial species. The entire genomic sequence is available by Aug. 26, 2002 at http://www.tigr.org. This genomic sequence is incorporated herein by reference in its entirety. The genomic sequence of GBS type V isolate 2603 V/R is also set forth in International Patent Application WO 02/34771.

[0300] In one embodiment, the invention relates to the polynucleotides, and fragments and derivatives thereof, set forth in the GBS clinical type V isolate 2603 published genome which are not disclosed within WO 02/34771. The invention further relates to polypeptides expressed by the polynucleotides of the invention.

[0301] Applicants have predicted that the GBS 2603 isolate contains approximately 2,176 predicted genes. Each predicted gene is set forth in Table 1, listed by a SAGxxxx ORF number. Table 1 also includes the predicted amino acid size of the predicted expressed protein and the predicted function, if known. The sequence of each SAG reference can be obtained at the TIGR website.

[0302] FIG. 1 is a circular representation of the GBS genome and comparative hybridisations using microarrays. A color version of FIG. 1 can be found in Tettelin et al., PNAS (2002) 99(19): 12391-12396 and online at www.pnas.org. The outer circle represents predicted coding regions on the plus strand color coded by role categories: violet indicating amino acid biosynthesis; light blue indicating biosynthesis of cofactors, prosthetic groups, and carriers; light green indicating cell envelope; red indicating cellular processes; brown indicating central intermediary metabolism; yellow indicating DNA metabolism; light gray indicating energy metabolism; magenta indicating fatty acid and phospholipid metabolism; pink indicating protein synthesis and fate; orange indicating purines, pyrimidines, nucleosides, and nucleotides; olive indicating regulatory functions and signal transduction; dark green indicating transcription; teal indicating transport and binding proteins; gray indicating unknown function; salmon indicating other categories; blue indicating hypothetical proteins.

[0303] The second circle represents predicted coding regions on the minus strand. In the third circle, black represents atypical nucleotide composition curve; green represents most atypical regions; magenta represents insertion elements; red diamonds indicate rRNAs.

[0304] Circles 4-22 represent comparative hybridisations of strain 2603 V/R with 19 GBS strains. Cy3/Cy5 (2603 V/R signal/test strain) ratio cutoffs were defined arbitrarily as Cy3/Cy5-1.0-3.0, the gene was present in the test strain, no color was added; Cy3/Cy5=3.0-10.0, ambiguous result (blue); Cy3/Cy5>10, gene absent in test strain (red).

[0305] Circles 4-9 represent type 1a strains 090, 515, A909, Davis, and DK8. Circles 10-11 represent type 1b strains S7 7357b and H36B. Circles 12-13 represent type II strains 18RS21 and DK21. Circles 14-18 represent type III COH1, COH31, D136C, M732 and M781. Circle 19 represents type V strain CJB111. Circles 20-21 represent type VIII strains SMU014 and JM9130013. Circle 22 represents nontypable (NT) strain CJB110. Throughout FIG. 1, varying regions of five or more consecutive genes are indicated by yellow bullets.

[0306] FIG. 4 depicts a linear representation of the GBS genome. The location of predicted coding regions color-coded by biological role (see FIG. 1) is displayed. Arrowed boxes represent the direction of transcription for each ORF. The number of membrane-spanning domains predicted by TopPred is displayed as lipid bi-layers on top of ORFs, only for those whose products have five or more predicted membrane spanning regions. Genes coding for rRNAs (16S, 23S, 5S) and tRNAs (clover leaf structure with number of genes) are indicated. Predicted Rho-independent transcriptional terminators are represented by hairpins.

[0307] ORF's were predicted by GLIMMER (See, Delcher, et al., (1999) Nucleic Acids Res. 27, 4636-4641 and Salzberg, et al., (1998) Nucleic Acids Res. 26, 544-548) trained with ORFs larger than 600 base pairs from the genomic sequence and GBS genes available in GenBank. All predicted proteins larger than 30 amino acids were searched against a nonredundant protein database. (See Fleischmann, et al., (1995) Science 269, 496-512). Frame-shifts and point mutations were detected and corrected where appropriate; those remaining were annotated as “authentic frame-shift” or “authentic point mutation”. Protein membrane-spanning domains were identified by TOPPRED (See Claros, et al., (1994) Comput. Appl. Biosci. 10, 685-686). Candidate lipoprotein signal peptides (See Hayashi et al., (1990) J. Bioenerg. Biomembr. 22, 451-471) were flagged by N-terminal exact matches to the pattern {DERK} (6)-[LIVMFWSTAG] (2)-[LIVMFYSTAGCQ]-[AGS]-C. Putative signal peptides were identified by using SIGNALP (Nielsen, et al., (1997) Protein Eng. 10, 1-6). Two sets of hidden Markov models were used to determine ORF membership in families and superfamilies: PFAM Ver. 5.5 (Bateman, et al., (2000) Nucleic Acids Res. 28, 263-266) and TIGRFAMS 1.0 (Haft et al., (2001) Nucleic Acids Res. 29, 41-43). Domain-based paralogous families were built by performing all-versus-all searches on the protein sequences by using a modified version of a previously described method. (Niermann, et al., (2001) Proc. Natl. Acad. Sci. USA 98, 4136-4141) Potential lineage-specific gene duplications were estimated by identification of OFRs more similar to ORFs within the GBS genome than to ORFs from other complete genomes. All ORFs were searched with FASTA3 (Pearson (2000) Methods Mol. Biol. 132, 185-219) against all ORF's from the complete genomes and matches with a FASTA P value of 10⁻¹⁵ were considered significant.

[0308] The genome consists of a circular chromosome of 2,160,266 base pairs with a G+C content of 35.7%. Base pair one of the chromosome was assigned within the putative origin of replication. The genome contains 80 tRNAs, 7rRNAs, and 3 sRNAs. Approximately 78% of the 2,176 predicted genes are transcribed in the same direction as that of DNA replication, a feature also observed in S. pn. and other low-GC Gram positive organisms.

[0309] Biological roles were assigned to 1,409 (65%) of the genome according to a classification scheme adapted from Riley (1993) Microbiol. Rev. 57, 862-952. Another 527 predicted proteins (24%) matched proteins of unknown function, and the remaining 240 (11%) had no database match. The expression of 50 of these hypothetical proteins was confirmed by Western Blot analysis, and the proteins were annotated as “proteins of unknown function.” A total of 339 paralogous protein families were identified in strain 2603, containing 941 predicted proteins (43% of the total).

[0310] The Western Blot analysis was conducted as follows. GBS strain 2603 V/R cells were grown in Todd-Hewitt broth (Difco) to OD600 nm=0.5. The culture was centrifuged for 20 minutes at 5,000 rpm. The supernatant was discarded, and bacteria were washed once with PBS, resuspended in 2 ml of 50 mM Tris-HCl pH 6.8, containing 400 units of Mutanolysin (Sigma), and incubated 2 hours at 37° C. After three cycles of freeze and thaw, cellular debris was removed by centrifugation at 14,000 rpm for 10 minutes, and the protein concentration of the supernatant was measured by the Bio-Rad Protein assay, with BSA as a standard. Purified recombinant proteins (50 ng) and total cell extracts (25 μg) derived from GBS serotype V 2603 V/R strain were separated by SDS/PADE and electroblotted onto nitrocellulose membranes for 1 hour at 100 V. The membranes were saturated by overnight incubation at 4° C. in 5% skimmed milk and 0.1% Tween 20 in PBS and incubated for 1 hour at room temperature with sera from immunized mice diluted 1:500-1:1,000 in saturation buffer. To reduce background due to antibodies raised against contaminating E. coli proteins, sera were preincubated with E. coli protein extracts absorbed on nitrocellulose strips. The membranes were washed twice in 3% skimmed milk and 0.1% Tween 20 in PBS and incubated for 1 hour with a 1:1,000 dilution of horseradish peroxidase-conjugated antimouse Ig (DAKO). After washing with 0.1% Tween 20 in PBS, the membranes were developed with the Opti-4CN Substrate Kit (Bio-Rad).

[0311] Table 2 comprises a list of predicted and experimentally characterized surface and secreted proteins from GBS. Candidate signal peptides and lipoprotein motifs were predicted with PSORT [Nakai, K & Horton, P. (1999) Trends Biochem Sci 24, 34-6] and other methods (see methods), sortase motifs (LPxTG) were detected using the FINDPATTERNS program of the GCG Package [Devereux, J., Haeberli, P. & Smithies, O. (1984) Nucleic Acids Res 12, 387-95] and hidden Markov models. Column “Other” indicates proteins carrying other motifs (e.g. integrin-binding motif RGD) or are similar to characterized surface-exposed proteins. Western blot results were considered positive when the antibodies revealed a predominant band of the expected molecular weight on the total protein extracts of S. agalactiae strain 2603 V/R, ORFs without + or − in this column were not tested in western blot. FACS analyses were performed for western blot positive proteins only. Western blot and FACS data are displayed only for proteins carrying at least one of the other motifs shown in the table. Column “GBS specific” indicates genes unique to S. agalactiae (when compared to other completely sequenced genomes) that are present in all the S. agalactiae strains tested in comparative genome hybridization analyses. Finally, only proteins carrying less than 3 predicted transmembrane domains are shown in the table, other proteins are likely to be embedded in the cytoplasmic membrane and are probably not exposed on the organism's surface.

[0312] FACS data was collected as follows: GBS 2603 V/R strain cells were grown in Todd-Hewitt broth (Difco) to OD600 nm=0.5. The culture was centrifuged for 20 minutes at 5,000 rpm, and bacteria were washed once with PBS, resuspended in PBS containing 0.05% paraformaldehyde, and incubated for 1 hour at 37° C. and then overnight at 4° C. Fifty microliters of fixed bacteria (OD600 nm 0.1) was washed once with PBS, resuspended in 20 μl of newborn calf serum (Sigma), and incubated for 1 hour at 4° C. in 100 μl of preimmune or immune sera and diluted 1:200 in dilutionbuffer (PBS, 20% newborn calf serum, 0.1% BSA). After centrifugation and washing with 200 μl of washing buffer (0.1% BSA in PBS), samples were incubated for 1 hour at 4° C. with 50 μl of R-phycoerythrin-conjugated F(ab)2 goat anti-mouse IgG (Jackson ImmunoResearch) diluted 1:100 in dilution buffer. Cells were washed with 200 μl of washing buffer and resuspended in 200 μl of PBS. Samples were analysed by using a FACS calibur apparatus (Becton Dickinson), and data were analyzed by using CELL QUEST (Becton Dickinson). A shift in mean fluorescence intensity of >75 channels compared with preimmune sera from the same mice was considered positive. This cutoff was determined from the mean plus two standard deviations of shifts obtained with control sera raised against mock purified recombinant proteins from cultures of E. coli carrying the empty expression vector and included in every experiment. Artifacts due to bacterial lysis were excluded by using antisera raised against six different known cytoplasmic proteins, all of which gave negative results.

Regions of Atypical Nucleotide Composition.

[0313] These regions were identified by the x² analysis: the distribution of all 64 trinucleotides (3 mers) was computed for the complete genome in all six reading frames, followed by the 3-mer distribution in 2,000-bp windows. Windows overlapped by 1,000 bp. For each window, the x² statistic on the difference between its 3-mer content, and that of the whole genome was computed.

In Silico Genome Comparisons

[0314] The protein sets of S. agalactiae, Streptococcus pneumoniae and S. pyogenes were compared by using FASTA3. A general description of the FASTA3 sequence comparison program is discussed in Pearson, W. R., “Flexible Sequence Similarity Searching with the FASTA3 Program Package”, (2000) Methods Mol. Biol., 132: 185-219. Shared genes were defined using a FASTA3 P value cutoff of 10⁻¹⁵. These shared genes and genes that S. agalactiae did not share with the other streptococci using this cutoff were subsequently searched against all completely sequenced genomes, and genes were defined as unique to streptococci or S. agalactiae when they did not share similarity with any other gene sets with a FASTA3 P value of 10⁻⁵ or lower. The use of two cutoffs provides for a more stringent analysis of shared or unique genes.

[0315] FIG. 2 is a schematic representation of in silico comparisons between streptococci. The protein sets of GBS, S. pn., and GAS were compared by using FASTA3. Numbers under the species name indicate genes that are not shared with the other species; values in parenthesis are the number of proteins in each species (excluding frame-shifted and degenerated genes). Numbers in the intersections indicate genes shared by two or three species. These are displayed in the color corresponding to the species used as the query. (GBS: green; S.pn.: blue; GAS: red. A color version of FIG. 2 can be found in Tettelin et al., PNAS (2002) 99(19): 12391-12396 and online at www.pnas.org.). Numbers in any given intersection are slightly different due to gene duplications in some species.

[0316] Table 3 lists genes which were shared among GBS, GAS and pneumococcus, but which were not found in any of the other completely sequenced genomes. The protein sets of S. agalactiae, S. pneumoniae, and S. pyogenes were compared using FASTA3 [Pearson, W. R. (2000) Methods Mol Biol 132, 185-219]. Shared genes were defined using a FASTA3 p value cutoff of 10⁻¹⁵. These shared genes and genes that S. agalactiae did not share with the other streptococci using this cutoff were subsequently searched against all completely sequenced genomes and genes were defined as unique to streptococci or S. agalactiae when they did not share similarity with any other gene sets with a FASTA3 p value of 10⁻⁵ or lower.

Synteny

[0317] Regions of conservation of gene synteny were computed as windows of 10 kb spanning at least three genes whose order was conserved in the other species. Regions were merged if they were less than 20 kb apart. The number of genes within each broad region was then calculated.

Comparative Genome Hybridizations

[0318] Comparative genome hybridizations (See FIG. 1) using DNA microarrays were performed between the sequenced type V strain 2603 V/R and 19 other GBS strains of multiple serotypes (See Table %). Predicted genes from strain 2603 V/R were amplified by PCR and arrayed on glass microscope slides. See Peterson, et al., (2000) J. Bacteriol. 182, 6192-6202. Genomic DNA was labelled according to protocols provided by J. DeRisi (www.microarrays.org/Pdfs/Genomic-DNALabel_B.pdf), except that the DNA was not digested or sheared before labelling. Arrays were scanned with a GENEPIX 4000B scanner (Axon Instruments, Foster City, Calif.), and individual hybridisation signals were quantitated with TIGR SPOTFINDER. See Hedge, et al., (2000), Biotechniques 29, 548-550, 552-554, 556. Cy3/Cy5 (2603 V/R signal/test strain) ratio cutoffs were defined arbitrarily as Cy3/Cy5=1.0-3.0, gene present in test strain; 3.0-10.0, ambiguous result; >10.0, gene absent. For ambiguous results, the gene may be divergent in the test strain relative to 2603 V/R, or the gene may be absent in the test strain but still produces paralogous gene family or a repetitive elemtn. Although cutoffs are arbitrary, they fit nicely the results for the variation of the capsule locus in the strains tested (see region 9 on FIG. 1) where most genes are slightly divergent and only a few are completely different.

[0319] The CGH detected 1,698 genes in all of the strains, whereas 401 genes from strain 2603 V/R (18% of the gene complement) were not detected in at least one other strain, suggesting that they are absent or significantly divergent in those strains. Two hundred sixty (38%) of the 683 genes specific to S. agalactiae when compared with the other two streptococci (FIG. 2), including virulence determinants and surface proteins, vary among S. agalactiae strains, whereas only 47 (4%) of the genes common to all three streptococcal species, including 5 of the 6 sortases identified in the genome, vary among strains. Thus, the in silico analysis of genes shared by the streptococci that are not expected to vary among this genus is consistent with the CGH analysis. Forty-four (25%) of the genes shared by S. agalactiae and S. pneumoniae and 44 (20%) of those shared by S. agalactiae and S. pyogenes vary in the CGH analysis. The first set contains many glycosyl transferases and proteins carrying a cell-wall anchor, whereas the second set displays many phage-related genes. One hundred thirty-six of the 315 genes unique to S. agalactiae when compared with all sequenced genomes vary among strains. These include R5, three capsular genes, two cell wall-anchored proteins, and three transcriptional regulators. Three hundred sixty-four (91%) of the 401 varying genes correspond to 15 regions containing more than 5 contiguous genes. Ten of these regions display an atypical nucleotide composition in strain 2603 V/R (FIG. 1), consistent with the possibility that they were horizontally transferred into this strain. Two of the largest regions (region 4, a prophage and region 7, similar to Tn916 from Enterococcus faecalis) are flanked by insertion sequence elements. The 15 regions contain many proteins predicted to be anchored on the cell wall or surface exposed, including Rib (region 3), sortases, glycosyl transferases, the capsule locus (region 9, divergent in all strains but the other type V strain CJB111), and phage-related genes. Region 14 is unique to S. agalactiae and spans 33 genes (SAG1989-SAG2021), including 25 proteins of unknown function, some of which carry a cell-wall anchor. It is flanked by an ISL3 transposase and displays an atypical nucleotide composition. Region 1, unique to S. agalactiae, is a possible plasmid or remnant of a phage (SAG0218-SAG0238), contains mostly hypothetical proteins, and is flanked by a site-specific recombinase. Region 8 is specific to S. agalactiae, comprises 20 proteins of unknown function (SAG1018-SAG1037), most of which are predicted to be membrane associated or secreted, and displays an atypical nucleotide composition.

[0320] The CGHresults were analyzed by profile clustering where genes are grouped based on their distribution patterns (FIG. 5). Sixteen clusters of five or more contiguous and noncontiguous genes comprising a total of 300 genes were identified (Table 6). Several clusters correspond to regions of contiguous genes described above. Some clusters of genes that do not share sequence similarity and are located at different loci in the genome display an identical profile. For instance, a cluster of genes containing a surface antigen (SAG0674-SAG0681) follows the same distribution as another cluster containing only hypothetical proteins (SAG0247-SAG0249). A putative pathogenicity protein (SAG2063) also clusters with a region containing several glycosyl transferases and Sec proteins (SAG1447-SAG1462).

[0321] Profile clustering was also used to group strains based on similarity of gene content (FIG. 5). In addition, the sequences of 19 genes from each of 11 S. agalactiae strains were determined after PCR amplification and used for phylogenetic analyses. The strains were the following: type Ia, 090 and A909; type Ib, H36B; type II, 18RS21; type III, COH1, M732 and M781; type V, 2603 V/R and 1169NT1; type VIII, JM9130013; and nontypeable strain CJB110. The set comprised 8 housekeeping genes and 11 genes coding for proteins predicted to be surface-exposed (Table 7).

[0322] The profile clustering was conducted as follows. The information and absence of genes based on the comparative genome hybridisation results was used to group genes based on their distribution patterns. The analysis used was essentially identical to that used for phylogenetic profile analysis. See Pellegrinie, et al., (1999) Proc. Natl. Acad. Sci. USA 96, 4285-4288. Each gene was assigned a binary profile based on its presence or absence across the different strains, with presence determined by a Cy3/Cy5 ratio <3.0 and absence ≧3.0. The gene profiles were then clustered by using the single-linkage clustering algorithm with column weighting (all with default settings) of CLUSTER (http://rana.lbl.gov). The CLUSTER program also groups the strains (columns) based on similarity of gene profiles. Clusters of genes and strains were viewed by using TREEVIEW (http://rana.lbl.gov).

[0323] Phylogenetic trees were inferred for the complete set of 19 genes and for the subsets of housekeeping and surface-exposed genes. Because the branching patterns in all three trees were identical, only the tree of the 19 genes is shown in FIG. 3. The degree of polymorphism of the housekeeping and the surface-exposed genes is similar (˜1 variable site among all of the strains per 100 bp).

[0324] The sequences of genes from the different strains were aligned by using CLUSTALW (See Thompson (1994), Nucleic Acids Res. 22, 4673-4680.) and trimmed to remove ambiguously aligned regions. Phylognetic trees of individual genes and of concatenated alignments of multiple genes were inferred by using maximum likelihood methods of PAUP* 4.0 b10 (Sinauer, Sunderland, Mass.). Bootstrap analysis was carried out using PAUP* as well. The possibility of recombination among strains was examined by using analysis of sequence variation using SIMPLOT (S. C. Ray) and analysis of phylogenetic heterogeneity by using MACCLADE (Sinauer).

[0325] Analysis of this variation showed no evidence for major recombination events between the strains. There were no long stretches of polymorphic sites that strongly supported other trees (analysis with MACCLADE), and there were no significant crossover events in plots of sequence similarity between strains (analysis with SIMPLOT). Some strain groupings (clades) generated by phylogenetic analysis were similar to clusters from the profile analysis (type III strains M781, M732 and COH1; type Ia strain 090 and nontypable strain CJB110), whereas others were different, possibly because of the aforementioned problems with the profile clustering. In both the phylogenetic analysis and the profile clustering, there is serotypedependent and -independent clustering (FIGS. 3 and 5). The presence of strains of the same serotype in different clades or clusters could be due to lateral gene transfer.

[0326] FIG. 5 demonstrates phylogenetic profiling of GBS strains based on comparative genome hybridisations. The information on presence and absence of genes based on the microarray comparative genome hybridization results was used for phylogenetic profile analysis. The presence of a particular gene or gene cluster is indicated in the figure by a red square and the absence of a gene or cluster by a black square. The relationship between strains based on this analysis is depicted by the tree at the top of the figure. The strains and their serotypes are indicated (NT: nontypeable). Clusters with identical profiles are reduced to a single horizontal line and the number of genes in each cluster is indicated on the right. The clusters of 5 or more genes, labeled in red text and numbered, are listed in Table 6. The 1698 genes shared by all 19 strains are labeled in green text.

[0327] FIG. 3 depicts a phylogenetic tree of GBS strains based on PCR sequences. The sequences of 19 genes (Table 7) from each of 11 GBS strains were aligned and trimmed to remove ambiguously aligned regions, and phylogenetic trees were inferred. Strain names are indicated in bold, and serotypes are indicated under the strain names. Bootstrap values are indicated on the branches.

Techniques

[0328] A summary of standard techniques and procedures which may be employed in order to perform the invention (e.g. to utilise the disclosed sequences for vaccination or diagnostic purposes) follows. This summary is not a limitation on the invention, but gives examples that may be used, but are not required.

General

[0329] The practice of the present invention will employ, unless otherwise indicated, conventional techniques of molecular biology, microbiology, recombinant DNA, and immunology, which are within the skill of the art. Such techniques are explained fully in the literature eg. Sambrook Molecular Cloning; A Laboratory Manual, Second Edition (1989) or Third Edition (2000); DNA Cloning, Volumes I and II (D. N Glover ed. 1985); Oligonucleotide Synthesis (M. J. Gait ed, 1984); Nucleic Acid Hybridization (B. D. Hames & S. J. Higgins eds. 1984); Transcription and Translation (B. D. Hames & S. J. Higgins eds. 1984); Animal Cell Culture (R. I. Freshney ed. 1986); Immobilized Cells and Enzymes (IRL Press, 1986); B. Perbal, A Practical Guide to Molecular Cloning (1984); the Methods in Enzymology series (Academic Press, Inc.), especially volumes 154 & 155; Gene Transfer Vectors for Mammalian Cells (J. H. Miller and M. P. Calos eds. 1987, Cold Spring Harbor Laboratory); Mayer and Walker, eds. (1987), Immunochemical Methods in Cell and Molecular Biology (Academic Press, London); Scopes, (1987) Protein Purification: Principles and Practice, Second Edition (Springer-Verlag, N.Y.), and Handbook of Experimental Immunology, Volumes I-IV (D. M. Weir and C. C. Blackwell eds 1986).

[0330] Standard abbreviations for nucleotides and amino acids are used in this specification.

Further Definitions

[0331] A composition containing X is “substantially free of” Y when at least 85% by weight of the total X+Y in the composition is X. Preferably, X comprises at least about 90% by weight of the total of X+Y in the composition, more preferably at least about 95% or even 99% by weight.

[0332] The term “comprising” means “including” as well as “consisting” e.g. a composition “comprising” X may consist exclusively of X or may include something additional e.g. X+Y.

[0333] The singular forms “a”, “and”, and “the” include plural referents unless the context clearly dictates otherwise. Thus, for example, reference to “a polynucleotide” includes a plurality of such polynucleotides and reference to “an epithelial cell” includes reference to one or more cells and equivalents thereof known to those skilled in the art, etc.

[0334] The term “heterologous” refers to two biological components that are not found together in nature. The components may be host cells, genes, or regulatory regions, such as promoters. Although the heterologous components are not found together in nature, they can function together, as when a promoter heterologous to a gene is operably linked to the gene. Another example is where a Streptococcal sequence is heterologous to a mouse host cell. A further examples would be two epitopes from the same or different proteins which have been assembled in a single protein in an arrangement not found in nature.

[0335] An “origin of replication” is a polynucleotide sequence that initiates and regulates replication of polynucleotides, such as an expression vector. The origin of replication behaves as an autonomous unit of polynucleotide replication within a cell, capable of replication under its own control. An origin of replication may be needed for a vector to replicate in a particular host cell. With certain origins of replication, an expression vector can be reproduced at a high copy number in the presence of the appropriate proteins within the cell. Examples of origins are the autonomously replicating sequences, which are effective in yeast; and the viral T-antigen, effective in COS-7 cells. A “mutant” sequence is defined as DNA, RNA or amino acid sequence differing from but having sequence identity with the native or disclosed sequence. Depending on the particular sequence, the degree of sequence identity between the native or disclosed sequence and the mutant sequence is preferably greater than 50% (eg. 60%, 70%, 80%, 90%, 95%, 99% or more, calculated using the Smith-Waterman algorithm as described above). As used herein, an “allelic variant” of a nucleic acid molecule, or region, for which nucleic acid sequence is provided herein is a nucleic acid molecule, or region, that occurs essentially at the same locus in the genome of another or second isolate, and that, due to natural variation caused by, for example, mutation or recombination, has a similar but not identical nucleic acid sequence. A coding region allelic variant typically encodes a protein having similar activity to that of the protein encoded by the gene to which it is being compared. An allelic variant can also comprise an alteration in the 5′ or 3′ untranslated regions of the gene, such as in regulatory control regions (eg. see U.S. Pat. No. 5,753,235).

Expression Systems

[0336] The Streptococcal nucleotide sequences can be expressed in a variety of different expression systems; for example those used with mammalian cells, baculoviruses, plants, bacteria, and yeast.

i. Mammalian Systems

[0337] Mammalian expression systems are known in the art. A mammalian promoter is any DNA sequence capable of binding mammalian RNA polymerase and initiating the downstream (3′) transcription of a coding sequence (eg. structural gene) into mRNA. A promoter will have a transcription initiating region, which is usually placed proximal to the 5′ end of the coding sequence, and a TATA box, usually located 25-30 base pairs (bp) upstream of the transcription initiation site. The TATA box is thought to direct RNA polymerase II to begin RNA synthesis at the correct site. A mammalian promoter will also contain an upstream promoter element, usually located within 100 to 200 bp upstream of the TATA box. An upstream promoter element determines the rate at which transcription is initiated and can act in either orientation [Sambrook et al. (1989) “Expression of Cloned Genes in Mammalian Cells.” In Molecular Cloning: A Laboratory Manual, 2nd ed.].

[0338] Mammalian viral genes are often highly expressed and have a broad host range; therefore sequences encoding mammalian viral genes provide particularly useful promoter sequences. Examples include the SV40 early promoter, mouse mammary tumor virus LTR promoter, adenovirus major late promoter (Ad MLP), and herpes simplex virus promoter. In addition, sequences derived from non-viral genes, such as the murine metallotheionein gene, also provide useful promoter sequences. Expression may be either constitutive or regulated (inducible), depending on the promoter can be induced with glucocorticoid in hormone-responsive cells.

[0339] The presence of an enhancer element (enhancer), combined with the promoter elements described above, will usually increase expression levels. An enhancer is a regulatory DNA sequence that can stimulate transcription up to 1000-fold when linked to homologous or heterologous promoters, with synthesis beginning at the normal RNA start site. Enhancers are also active when they are placed upstream or downstream from the transcription initiation site, in either normal or flipped orientation, or at a distance of more than 1000 nucleotides from the promoter [Maniatis et al. (1987) Science 236:1237; Alberts et al. (1989) Molecular Biology of the Cell, 2nd ed.]. Enhancer elements derived from viruses may be particularly useful, because they usually have a broader host range. Examples include the SV40 early gene enhancer [Dijkema et al (1985) EMBO J. 4:761] and the enhancer/promoters derived from the long terminal repeat (LTR) of the Rous Sarcoma Virus [Gorman et al. (1982b) Proc. Natl. Acad. Sci. 79:6777] and from human cytomegalovirus [Boshart et al. (1985) Cell 41:521]. Additionally, some enhancers are regulatable and become active only in the presence of an inducer, such as a hormone or metal ion [Sassone-Corsi and Borelli (1986) Trends Genet. 2:215; Maniatis et al. (1987) Science 236:1237].

[0340] A DNA molecule may be expressed intracellularly in mammalian cells. A promoter sequence may be directly linked with the DNA molecule, in which case the first amino acid at the N-terminus of the recombinant protein will always be a methionine, which is encoded by the ATG start codon. If desired, the N-terminus may be cleaved from the protein by in vitro incubation with cyanogen bromide.

[0341] Alternatively, foreign proteins can also be secreted from the cell into the growth media by creating chimeric DNA molecules that encode a fusion protein comprised of a leader sequence fragment that provides for secretion of the foreign protein in mammalian cells. Preferably, there are processing sites encoded between the leader fragment and the foreign gene that can be cleaved either in vivo or in vitro. The leader sequence fragment usually encodes a signal peptide comprised of hydrophobic amino acids which direct the secretion of the protein from the cell. The adenovirus triparite leader is an example of a leader sequence that provides for secretion of a foreign protein in mammalian cells.

[0342] Usually, transcription termination and polyadenylation sequences recognized by mammalian cells are regulatory regions located 3′ to the translation stop codon and thus, together with the promoter elements, flank the coding sequence. The 3′ terminus of the mature mRNA is formed by site-specific post-transcriptional cleavage and polyadenylation [Birnstiel et al. (1985) Cell 41:349; Proudfoot and Whitelaw (1988) “Termination and 3′ end processing of eukaryotic RNA. In Transcription and splicing (ed. B. D. Hames and D. M. Glover); Proudfoot (1989) Trends Biochem. Sci. 14:105]. These sequences direct the transcription of an mRNA which can be translated into the polypeptide encoded by the DNA. Examples of transcription terminater/polyadenylation signals include those derived from SV40 [Sambrook et al (1989) “Expression of cloned genes in cultured mammalian cells.” In Molecular Cloning: A Laboratory Manual].

[0343] Usually, the above described components, comprising a promoter, polyadenylation signal, and transcription termination sequence are put together into expression constructs. Enhancers, introns with functional splice donor and acceptor sites, and leader sequences may also be included in an expression construct, if desired. Expression constructs are often maintained in a replicon, such as an extrachromosomal element (eg. plasmids) capable of stable maintenance in a host, such as mammalian cells or bacteria. Mammalian replication systems include those derived from animal viruses, which require trans-acting factors to replicate. For example, plasmids containing the replication systems of papovaviruses, such as SV40 [Gluzman (1981) Cell 23:175] or polyomavirus, replicate to extremely high copy number in the presence of the appropriate viral T antigen. Additional examples of mammalian replicons include those derived from bovine papillomavirus and Epstein-Barr virus. Additionally, the replicon may have two replicaton systems, thus allowing it to be maintained, for example, in mammalian cells for expression and in a prokaryotic host for cloning and amplification. Examples of such mammalian-bacteria shuttle vectors include pMT2 [Kaufnan et al. (1989) Mol. Cell. Biol. 9:946] and pHEBO [Shimizu et al. (1986) Mol. Cell. Biol. 6:1074]. The transformation procedure used depends upon the host to be transformed. Methods for introduction of heterologous polynucleotides into mammalian cells are known in the art and include dextran-mediated transfection, calcium phosphate precipitation, polybrene mediated transfection, protoplast fusion, electroporation, encapsulation of the polynucleotide(s) in liposomes, and direct microinjection of the DNA into nuclei.

[0344] Mammalian cell lines available as hosts for expression are known in the art and include many immortalized cell lines available from the American Type Culture Collection (ATCC), including but not limited to, Chinese hamster ovary (CHO) cells, HeLa cells, baby hamster kidney (BHK) cells, monkey kidney cells (COS), human hepatocellular carcinoma cells (eg. Hep G2), and a number of other cell lines.

ii. Baculovirus Systems

[0345] The polynucleotide encoding the protein can also be inserted into a suitable insect expression vector, and is operably linked to the control elements within that vector. Vector construction employs techniques which are known in the art. Generally, the components of the expression system include a transfer vector, usually a bacterial plasmid, which contains both a fragment of the baculovirus genome, and a convenient restriction site for insertion of the heterologous gene or genes to be expressed; a wild type baculovirus with a sequence homologous to the baculovirus-specific fragment in the transfer vector (this allows for the homologous recombination of the heterologous gene in to the baculovirus genome); and appropriate insect host cells and growth media.

[0346] After inserting the DNA sequence encoding the protein into the transfer vector, the vector and the wild type viral genome are transfected into an insect host cell where the vector and viral genome are allowed to recombine. The packaged recombinant virus is expressed and recombinant plaques are identified and purified. Materials and methods for baculovirus/insect cell expression systems are commercially available in kit form from, inter alia, Invitrogen, San Diego Calif. (“MaxBac” kit). These techniques are generally known to those skilled in the art and fully described in Summers & Smith, Texas Agricultural Experiment Station Bulletin No. 1555 (1987) (“Summers & Smith”).

[0347] Prior to inserting the DNA sequence encoding the protein into the baculovirus genome, the above described components, comprising a promoter, leader (if desired), coding sequence, and transcription termination sequence, are usually assembled into an intermediate transplacement construct (transfer vector). This may contain a single gene and operably linked regulatory elements; multiple genes, each with its owned set of operably linked regulatory elements; or multiple genes, regulated by the same set of regulatory elements. Intermediate transplacement constructs are often maintained in a replicon, such as an extra-chromosomal element (e.g. plasmids) capable of stable maintenance in a host, such as a bacterium. The replicon will have a replication system, thus allowing it to be maintained in a suitable host for cloning and amplification. Currently, the most commonly used transfer vector for introducing foreign genes into AcNPV is pAc373. Many other vectors, known to those of skill in the art, have also been designed. These include, for example, pVL985 (which alters the polyhedrin start codon from ATG to ATT, and which introduces a BamHI cloning site 32 basepairs downstream from the ATT; see Luckow and Summers, Virology (1989) 17:31. The plasmid usually also contains the polyhedrin polyadenylation signal (Miller et al. (1988) Ann. Rev. Microbiol., 42:177) and a prokaryotic ampicillin-resistance (amp) gene and origin of replication for selection and propagation in E. coli.

[0348] Baculovirus transfer vectors usually contain a baculovirus promoter. A baculovirus promoter is any DNA sequence capable of binding a baculovirus RNA polymerase and initiating the downstream (5′ to 3′) transcription of a coding sequence (eg. structural gene) into mRNA. A promoter will have a transcription initiation region which is usually placed proximal to the 5′ end of the coding sequence. This transcription initiation region usually includes an RNA polymerase binding site and a transcription initiation site. A baculovirus transfer vector may also have a second domain called an enhancer, which, if present, is usually distal to the structural gene. Expression may be either regulated or constitutive.

[0349] Structural genes, abundantly transcribed at late times in a viral infection cycle, provide particularly useful promoter sequences. Examples include sequences derived from the gene encoding the viral polyhedron protein, Friesen et al., (1986) “The Regulation of Baculovirus Gene Expression,” in: The Molecular Biology of Baculoviruses (ed. Walter Doerfler); EPO Publ. Nos. 127 839 and 155 476; and the gene encoding the p10 protein, Vlak et al., (1988), J. Gen. Virol. 69:765.

[0350] DNA encoding suitable signal sequences can be derived from genes for secreted insect or baculovirus proteins, such as the baculovirus polyhedrin gene (Carbonell et al. (1988) Gene, 73:409). Alternatively, since the signals for mammalian cell posttranslational modifications (such as signal peptide cleavage, proteolytic cleavage, and phosphorylation) appear to be recognized by insect cells, and the signals required for secretion and nuclear accumulation also appear to be conserved between the invertebrate cells and vertebrate cells, leaders of non-insect origin, such as those derived from genes encoding human α-interferon, Maeda et al., (1985), Nature 315:592; human gastrin-releasing peptide, Lebacq-Verheyden et al., (1988), Molec. Cell. Biol. 8:3129; human IL-2, Smith et al., (1985) Proc. Nat'l Acad. Sci. USA, 82:8404; mouse IL-3, (Miyajima et al., (1987) Gene 58:273; and human glucocerebrosidase, Martin et al. (1988) DNA, 7:99, can also be used to provide for secretion in insects.

[0351] A recombinant polypeptide or polyprotein may be expressed intracellularly or, if it is expressed with the proper regulatory sequences, it can be secreted. Good intracellular expression of nonfused foreign proteins usually requires heterologous genes that ideally have a short leader sequence containing suitable translation initiation signals preceding an ATG start signal. If desired, methionine at the N-terminus may be cleaved from the mature protein by in vitro incubation with cyanogen bromide.

[0352] Alternatively, recombinant polyproteins or proteins which are not naturally secreted can be secreted from the insect cell by creating chimeric DNA molecules that encode a fusion protein comprised of a leader sequence fragment that provides for secretion of the foreign protein in insects. The leader sequence fragment usually encodes a signal peptide comprised of hydrophobic amino acids which direct the translocation of the protein into the endoplasmic reticulum.

[0353] After insertion of the DNA sequence and/or the gene encoding the expression product precursor of the protein, an insect cell host is co-transformed with the heterologous DNA of the transfer vector and the genomic DNA of wild type baculovirus—usually by co-transfection. The promoter and transcription termination sequence of the construct will usually comprise a 2-5 kb section of the baculovirus genome. Methods for introducing heterologous DNA into the desired site in the baculovirus virus are known in the art. (See Summers & Smith supra; Ju et al. (1987); Smith et al., Mol. Cell. Biol. (1983) 3:2156; and Luckow and Summers (1989)). For example, the insertion can be into a gene such as the polyhedrin gene, by homologous double crossover recombination; insertion can also be into a restriction enzyme site engineered into the desired baculovirus gene. Miller et al., (1989), Bioessays 4:91.The DNA sequence, when cloned in place of the polyhedrin gene in the expression vector, is flanked both 5′ and 3′ by polyhedrin-specific sequences and is positioned downstream of the polyhedrin promoter.

[0354] The newly formed baculovirus expression vector is subsequently packaged into an infectious recombinant baculovirus. Homologous recombination occurs at low frequency (between about 1% and about 5%); thus, the majority of the virus produced after cotransfection is still wild-type virus. Therefore, a method is necessary to identify recombinant viruses. An advantage of the expression system is a visual screen allowing recombinant viruses to be distinguished. The polyhedrin protein, which is produced by the native virus, is produced at very high levels in the nuclei of infected cells at late times after viral infection. Accumulated polyhedrin protein forms occlusion bodies that also contain embedded particles. These occlusion bodies, up to 15 μm in size, are highly refractile, giving them a bright shiny appearance that is readily visualized under the light microscope. Cells infected with recombinant viruses lack occlusion bodies. To distinguish recombinant virus from wild-type virus, the transfection supernatant is plaqued onto a monolayer of insect cells by techniques known to those skilled in the art Namely, the plaques are screened under the light microscope for the presence (indicative of wild-type virus) or absence (indicative of recombinant virus) of occlusion bodies. “Current Protocols in Microbiology” Vol. 2 (Ausubel et al. eds) at 16.8 (Supp. 10, 1990); Summers & Smith, supra; Miller et al. (1989).

[0355] Recombinant baculovirus expression vectors have been developed for infection into several insect cells. For example, recombinant baculoviruses have been developed for, inter alia: Aedes aegypti, Autographa californica, Bombyx mori, Drosophila melanogaster, Spodoptera frugiperda, and Trichoplusia ni (WO 89/046699; Carbonell et al., (1985) J. Virol. 56:153; Wright (1986) Nature 321:718; Smith et al., (1983) Mol. Cell. Biol. 3:2156; and see generally, Fraser, et al. (1989) In Vitro Cell. Dev. Biol. 25:225).

[0356] Cells and cell culture media are commercially available for both direct and fusion expression of heterologous polypeptides in a baculovirus/expression system; cell culture technology is generally known to those skilled in the art. See, eg. Summers & Smith supra.

[0357] The modified insect cells may then be grown in an appropriate nutrient medium, which allows for stable maintenance of the plasmid(s) present in the modified insect host. Where the expression product gene is under inducible control, the host may be grown to high density, and expression induced. Alternatively, where expression is constitutive, the product will be continuously expressed into the medium and the nutrient medium must be continuously circulated, while removing the product of interest and augmenting depleted nutrients. The product may be purified by such techniques as chromatography, eg. HPLC, affinity chromatography, ion exchange chromatography, etc.; electrophoresis; density gradient centrifugation; solvent extraction, etc. As appropriate, the product may be further purified, as required, so as to remove substantially any insect proteins which are also present in the medium, so as to provide a product which is at least substantially free of host debris, eg. proteins, lipids and polysaccharides.

[0358] In order to obtain protein expression, recombinant host cells derived from the transformants are incubated under conditions which allow expression of the recombinant protein encoding sequence. These conditions will vary, dependent upon the host cell selected. However, the conditions are readily ascertainable to those of ordinary skill in the art, based upon what is known in the art.

iii. Plant Systems

[0359] There are many plant cell culture and whole plant genetic expression systems known in the art. Exemplary plant cellular genetic expression systems include those described in patents, such as: U.S. Pat. No. 5,693,506; U.S. Pat. No. 5,659,122; and U.S. Pat. No. 5,608,143. Additional examples of genetic expression in plant cell culture has been described by Zenk, Phytochemistry 30:3861-3863 (1991). Descriptions of plant protein signal peptides may be found in addition to the references described above in Vaulcombe et al., Mol. Gen. Genet. 209:33-40 (1987); Chandler et al., Plant Molecular Biology 3:407-418 (1984); Rogers, J. Biol. Chem. 260:3731-3738 (1985); Rothstein et al., Gene 55:353-356 (1987); Whittier et al., Nucleic Acids Research 15:2515-2535 (1987); Wirsel et al., Molecular Microbiology 3:3-14 (1989); Yu et al., Gene 122:247-253 (1992). A description of the regulation of plant gene expression by the phytohormone, gibberellic acid and secreted enzymes induced by gibberellic acid can be found in R. L. Jones and J. MacMillin, Gibberellins: in: Advanced Plant Physiology,. Malcolm B. Wilkins, ed., 1984 Pitman Publishing Limited, London, pp. 21-52. References that describe other metabolically-regulated genes: Sheen, Plant Cell, 2:1027-1038(1990); Maas et al., EMBO J. 9:3447-3452 (1990); Benkel and Hickey, Proc. Natl. Acad. Sci. 84:1337-1339 (1987). Typically, using techniques known in the art, a desired polynucleotide sequence is inserted into an expression cassette comprising genetic regulatory elements designed for operation in plants. The expression cassette is inserted into a desired expression vector with companion sequences upstream and downstream from the expression cassette suitable for expression in a plant host. The companion sequences will be of plasmid or viral origin and provide necessary characteristics to the vector to permit the vectors to move DNA from an original cloning host, such as bacteria, to the desired plant host. The basic bacterial/plant vector construct will preferably provide a broad host range prokaryote replication origin; a prokaryote selectable marker; and, for Agrobacterium transformations, T DNA sequences for Agrobacterium-mediated transfer to plant chromosomes. Where the heterologous gene is not readily amenable to detection, the construct will preferably also have a selectable marker gene suitable for determining if a plant cell has been transformed. A general review of suitable markers, for example for the members of the grass family, is found in Wilmink and Dons, 1993, Plant Mol. Biol. Reptr, 11(2):165-185.

[0360] Sequences suitable for permitting integration of the heterologous sequence into the plant genome are also recommended. These might include transposon sequences and the like for homologous recombination as well as Ti sequences which permit random insertion of a heterologous expression cassette into a plant genome. Suitable prokaryote selectable markers include resistance toward antibiotics such as ampicillin or tetracycline. Other DNA sequences encoding additional functions may also be present in the vector, as is known in the art.

[0361] The nucleic acid molecules of the subject invention may be included into an expression cassette for expression of the protein(s) of interest. Usually, there will be only one expression cassette, although two or more are feasible. The recombinant expression cassette will contain in addition to the heterologous protein encoding sequence the following elements, a promoter region, plant 5′ untranslated sequences, initiation codon depending upon whether or not the structural gene comes equipped with one, and a transcription and translation termination sequence. Unique restriction enzyme sites at the 5′ and 3′ ends of the cassette allow for easy insertion into a pre-existing vector.

[0362] A heterologous coding sequence may be for any protein relating to the present invention. The sequence encoding the protein of interest will encode a signal peptide which allows processing and translocation of the protein, as appropriate, and will usually lack any sequence which might result in the binding of the desired protein of the invention to a membrane. Since, for the most part, the transcriptional initiation region will be for a gene which is expressed and translocated during germination, by employing the signal peptide which provides for translocation, one may also provide for translocation of the protein of interest. In this way, the protein(s) of interest will be translocated from the cells in which they are expressed and may be efficiently harvested. Typically secretion in seeds are across the aleurone or scutellar epithelium layer into the endosperm of the seed. While it is not required that the protein be secreted from the cells in which the protein is produced, this facilitates the isolation and purification of the recombinant protein.

[0363] Since the ultimate expression of the desired gene product will be in a eucaryotic cell it is desirable to determine whether any portion of the cloned gene contains sequences which will be processed out as introns by the host's splicosome machinery. If so, site-directed mutagenesis of the “intron” region may be conducted to prevent losing a portion of the genetic message as a false intron code, Reed and Maniatis, Cell 41:95-105, 1985.

[0364] The vector can be microinjected directly into plant cells by use of micropipettes to mechanically transfer the recombinant DNA. Crossway, Mol. Gen. Genet, 202:179-185, 1985. The genetic material may also be transferred into the plant cell by using polyethylene glycol, Krens, et al., Nature, 296, 72-74, 1982. Another method of introduction of nucleic acid segments is high velocity ballistic penetration by small particles with the nucleic acid either within the matrix of small beads or particles, or on the surface, Klein, et al., Nature, 327, 70-73, 1987 and Knudsen and Muller, 1991, Planta, 185:330-336 teaching particle bombardment of barley endosperm to create transgenic barley. Yet another method of introduction would be fusion of protoplasts with other entities, either minicells, cells, lysosomes or other fusible lipid-surfaced bodies, Fraley, et al., Proc. Natl. Acad. Sci. USA, 79, 1859-1863, 1982.

[0365] The vector may also be introduced into the plant cells by electroporation. (Fromm et al., Proc. Natl Acad. Sci. USA 82:5824, 1985). In this technique, plant protoplasts are electroporated in the presence of plasmids containing the gene construct. Electrical impulses of high field strength reversibly permeabilize biomembranes allowing the introduction of the plasmids. Electroporated plant protoplasts reform the cell wall, divide, and form plant callus.

[0366] All plants from which protoplasts can be isolated and cultured to give whole regenerated plants can be transformed by the present invention so that whole plants are recovered which contain the transferred gene. It is known that practically all plants can be regenerated from cultured cells or tissues, including but not limited to all major species of sugarcane, sugar beet, cotton, fruit and other trees, legumes and vegetables. Some suitable plants include, for example, species from the genera Fragaria, Lotus, Medicago, Onobrychis, Trifolium, Trigonella, Vigna, Citrus, Linum, Geranium, Manihot, Daucus, Arabidopsis, Brassica, Raphanus, Sinapis, Atropa, Capsicum, Datura, Hyoscyamus, Lycopersion, Nicotiana, Solanum, Petunia, Digitalis, Majorana, Cichorium, Helianthus, Lactuca, Bromus, Asparagus, Antirrhinum, Hererocallis, Nemesia, Pelargonium, Panicum, Pennisetum, Ranunculus, Senecio, Salpiglossis, Cucumis, Browaalia, Glycine, Lolium, Zea, Triticum, Sorghum, and Datura.

[0367] Means for regeneration vary from species to species of plants, but generally a suspension of transformed protoplasts containing copies of the heterologous gene is first provided. Callus tissue is formed and shoots may be induced from callus and subsequently rooted. Alternatively, embryo formation can be induced from the protoplast suspension. These embryos germinate as natural embryos to form plants. The culture media will generally contain various amino acids and hormones, such as auxin and cytokinins. It is also advantageous to add glutamic acid and proline to the medium, especially for such species as corn and alfalfa. Shoots and roots normally develop simultaneously. Efficient regeneration will depend on the medium, on the genotype, and on the history of the culture. If these three variables are controlled, then regeneration is fully reproducible and repeatable.

[0368] In some plant cell culture systems, the desired protein of the invention may be excreted or alternatively, the protein may be extracted from the whole plant. Where the desired protein of the invention is secreted into the medium, it may be collected. Alternatively, the embryos and embryoless-half seeds or other plant tissue may be mechanically disrupted to release any secreted protein between cells and tissues. The mixture may be suspended in a buffer solution to retrieve soluble proteins. Conventional protein isolation and purification methods will be then used to purify the recombinant protein. Parameters of time, temperature pH, oxygen, and volumes will be adjusted through routine methods to optimize expression and recovery of heterologous protein.

iv. Bacterial Systems

[0369] Bacterial expression techniques are known in the art. A bacterial promoter is any DNA sequence capable of binding bacterial RNA polymerase and initiating the downstream (3′) transcription of a coding sequence (eg. structural gene) into mRNA. A promoter will have a transcription initiation region which is usually placed proximal to the 5′ end of the coding sequence. This transcription initiation region usually includes an RNA polymerase binding site and a transcription initiation site. A bacterial promoter may also have a second domain called an operator, that may overlap an adjacent RNA polymerase binding site at which RNA synthesis begins. The operator permits negative regulated (inducible) transcription, as a gene repressor protein may bind the operator and thereby inhibit transcription of a specific gene. Constitutive expression may occur in the absence of negative regulatory elements, such as the operator. In addition, positive regulation may be achieved by a gene activator protein binding sequence, which, if present is usually proximal (5′) to the RNA polymerase binding sequence. An example of a gene activator protein is the catabolite activator protein (CAP), which helps initiate transcription of the lac operon in Escherichia coli (E. coli) [Raibaud et al. (1984) Annu. Rev. Genet. 18:173]. Regulated expression may therefore be either positive or negative, thereby either enhancing or reducing transcription.

[0370] Sequences encoding metabolic pathway enzymes provide particularly useful promoter sequences. Examples include promoter sequences derived from sugar metabolizing enzymes, such as galactose, lactose (lac) [Chang et al. (1977) Nature 198:1056], and maltose. Additional examples include promoter sequences derived from biosynthetic enzymes such as tryptophan (trp) [Goeddel et al. (1980) Nuc. Acids Res. 8:4057; Yelverton et al. (1981) Nucl Acids Res. 9:731; U.S. Pat. No. 4,738,921; EP-A-0036776 and EP-A-0121775]. The g-laotamase (bla) promoter system [Weissmann (1981) “The cloning of interferon and other mistakes.” In Interferon 3 (ed. I. Gresser)], bacteriophage lambda PL [Shimatake et al. (1981) Nature 292:128] and T5 [U.S. Pat. No. 4,689,406] promoter systems also provide useful promoter sequences.

[0371] In addition, synthetic promoters which do not occur in nature also function as bacterial promoters. For example, transcription activation sequences of one bacterial or bacteriophage promoter may be joined with the operon sequences of another bacterial or bacteriophage promoter, creating a synthetic hybrid promoter [U.S. Pat. No. 4,551,433]. For example, the tac promoter is a hybrid trp-lac promoter comprised of both trp promoter and lac operon sequences that is regulated by the lac repressor [Amann et al. (1983) Gene 25:167; de Boer et al. (1983) Proc. Natl. Acad. Sci. 80:21]. Furthermore, a bacterial promoter can include naturally occurring promoters of non-bacterial origin that have the ability to bind bacterial RNA polymerase and initiate transcription. A naturally occurring promoter of non-bacterial origin can also be coupled with a compatible RNA polymerase to produce high levels of expression of some genes in prokaryotes. The bacteriophage T7 RNA polymerase/promoter system is an example of a coupled promoter system [Studier et al. (1986) J. Mol. Biol. 189:113; Tabor et al. (1985) Proc Natl. Acad. Sci. 82:1074]. In addition, a hybrid promoter can also be comprised of a bacteriophage promoter and an E. coli operator region (EPO-A-0 267 851).

[0372] In addition to a functioning promoter sequence, an efficient ribosome binding site is also useful for the expression of foreign genes in prokaryotes. In E. coli, the ribosome binding site is called the Shine-Dalgarno (SD) sequence and includes an initiation codon (ATG) and a sequence 3-9 nucleotides in length located 3-11 nucleotides upstream of the initiation codon [Shine et al. (1975) Nature 254:34]. The SD sequence is thought to promote binding of mRNA to the ribosome by the pairing of bases between the SD sequence and the 3′ and of E. coli 16S rRNA [Steitz et al. (1979) “Genetic signals and nucleotide sequences in messenger RNA.” In Biological Regulation and Development: Gene Expression (ed. R. F. Goldberger)]. To express eukaryotic genes and prokaryotic genes with weak ribosome-binding site [Sambrook et al. (1989) “Expression of cloned genes in Escherichia coli.” In Molecular Cloning: A Laboratory Manual].

[0373] A DNA molecule may be expressed intracellularly. A promoter sequence may be directly linked with the DNA molecule, in which case the first amino acid at the N-terminus will always be a methionine, which is encoded by the ATG start codon. If desired, methionine at the N-terminus may be cleaved from the protein by in vitro incubation with cyanogen bromide or by either in vivo on in vitro incubation with a bacterial methionine N-terminal peptidase (EPO-A-0 219 237).

[0374] Fusion proteins provide an alternative to direct expression. Usually, a DNA sequence encoding the N-terminal portion of an endogenous bacterial protein, or other stable protein, is fused to the 5′ end of heterologous coding sequences. Upon expression, this construct will provide a fusion of the two amino acid sequences. For example, the bacteriophage lambda cell gene can be linked at the 5′ terminus of a foreign gene and expressed in bacteria. The resulting fusion protein preferably retains a site for a processing enzyme (factor Xa) to cleave the bacteriophage protein from the foreign gene [Nagai et al. (1984) Nature 309:810]. Fusion proteins can also be made with sequences from the lacZ [Jia et al. (1987) Gene 60:197], trpE [Allen et al. (1987) J. Biotechnol. 5:93; Makoff et al. (1989) J. Gen. Microbiol. 135:11], and Chey [EP-A-0 324 647] genes. The DNA sequence at the junction of the two amino acid sequences may or may not encode a cleavable site. Another example is a ubiquitin fusion protein. Such a fusion protein is made with the ubiquitin region that preferably retains a site for a processing enzyme (eg. ubiquitin specific processing-protease) to cleave the ubiquitin from the foreign protein. Through this method, native foreign protein can be isolated [Miller et al. (1989) Bio/Technology 7:698].

[0375] Alternatively, foreign proteins can also be secreted from the cell by creating chimeric DNA molecules that encode a fusion protein comprised of a signal peptide sequence fragment that provides for secretion of the foreign protein in bacteria [U.S. Pat. No. 4,336,336]. The signal sequence fragment usually encodes a signal peptide comprised of hydrophobic amino acids which direct the secretion of the protein from the cell. The protein is either secreted into the growth media (gram-positive bacteria) or into the periplasmic space, located between the inner and outer membrane of the cell (gram-negative bacteria). Preferably there are processing sites, which can be cleaved either in vivo or in vitro encoded between the signal peptide fragment and the foreign gene.

[0376] DNA encoding suitable signal sequences can be derived from genes for secreted bacterial proteins, such as the E. coli outer membrane protein gene (ompA) [Masui et al. (1983), in: Experimental Manipulation of Gene Expression; Ghrayeb et al. (1984) EMBO J. 3:2437] and the E. coli alkaline phosphatase signal sequence (phoA) [Oka et al. (1985) Proc. Natl. Acad. Sci. 82:7212]. As an additional example, the signal sequence of the alpha-amylase gene from various Bacillus strains can be used to secrete heterologous proteins from B. subtilis [Palva et al. (1982) Proc. Natl. Acad. Sci. USA 79:5582; EP-A-0 244 042].

[0377] Usually, transcription termination sequences recognized by bacteria are regulatory regions located 3′ to the translation stop codon, and thus together with the promoter flank the coding sequence. These sequences direct the transcription of an mRNA which can be translated into the polypeptide encoded by the DNA. Transcription termination sequences frequently include DNA sequences of about 50 nucleotides capable of forming stem loop structures that aid in terminating transcription. Examples include transcription termination sequences derived from genes with strong promoters, such as the trp gene in E. coli as well as other biosynthetic genes.

[0378] Usually, the above described components, comprising a promoter, signal sequence (if desired), coding sequence of interest, and transcription termination sequence, are put together into expression constructs. Expression constructs are often maintained in a replicon, such as an extrachromosomal element (eg. plasmids) capable of stable maintenance in a host, such as bacteria. The replicon will have a replication system, thus allowing it to be maintained in a prokaryotic host either for expression or for cloning and amplification. In addition, a replicon may be either a high or low copy number plasmid. A high copy number plasmid will generally have a copy number ranging from about 5 to about 200, and usually about 10 to about 150. A host containing a high copy number plasmid will preferably contain at least about 10, and more preferably at least about 20 plasmids. Either a high or low copy number vector may be selected, depending upon the effect of the vector and the foreign protein on the host.

[0379] Alternatively, the expression constructs can be integrated into the bacterial genome with an integrating vector. Integrating vectors usually contain at least one sequence homologous to the bacterial chromosome that allows the vector to integrate. Integrations appear to result from recombinations between homologous. DNA in the vector and the bacterial chromosome. For example, integrating vectors constructed with DNA from various Bacillus strains integrate into the Bacillus chromosome (EP-A-0 127 328). Integrating vectors may also be comprised of bacteriophage or transposon sequences.

[0380] Usually, extrachromosomal and integrating expression constructs may contain selectable markers to allow for the selection of bacterial strains that have been transformed. Selectable markers can be expressed in the bacterial host and may include genes which render bacteria resistant to drugs such as ampicillin, chloramphenicol, erythromycin, kanamycin (neomycin), and tetracycline [Davies et al. (1978) Annu. Rev. Microbiol. 32:469]. Selectable markers may also include biosynthetic genes, such as those in the histidine, tryptophan, and leucine biosynthetic pathways.

[0381] Alternatively, some of the above described components can be put together in transformation vectors. Transformation vectors are usually comprised of a selectable market that is either maintained in a replicon or developed into an integrating vector, as described above.

[0382] Expression and transformation vectors, either extra-chromosomal replicons or integrating vectors, have been developed for transformation into many bacteria For example, expression vectors have been developed for, inter alia, the following bacteria: Bacillus subtilis [Palva et al. (1982) Proc. Natl. Acad. Sci. USA 79:5582; EP-A-0 036 259 and EP-A-0 063 953; WO 84/04541], Escherichia coli [Shimatake et al. (1981) Nature 292:128; Amann et al. (1985) Gene 40:183; Studier et al. (1986) J. Mol. Biol. 189:113; EP-A-0 036 776,EP-A-0 136 829 and EP-A-0 136 907], Streptococcus cremoris [Powell et al. (1988) Appl. Environ. Microbiol. 54:655]; Streptococcus lividans [Powell et al. (1988) Appl. Environ. Microbiol. 54:655], Streptomyces lividans [U.S. Pat. No. 4,745,056].

[0383] Methods of introducing exogenous DNA into bacterial hosts are well-known in the art, and usually include either the transformation of bacteria treated with CaCl₂ or other agents, such as divalent cations and DMSO. DNA can also be introduced into bacterial cells by electroporation. Transformation procedures usually vary with the bacterial species to be transformed. See eg. [Masson et al. (1989) FEMS Microbiol. Lett. 60:273; Palva et al. (1982) Proc. Natl. Acad. Sci. USA 79:5582; EP-A-0 036 259 and EP-A-0 063 953; WO 84/04541, Bacillus], [Miller et al. (1988) Proc. Natl. Acad. Sci. 85:856; Wang et al. (1990) J. Bacteriol. 172:949, Campylobacter], [Cohen et al. (1973) Proc. Natl. Acad. Sci. 69:2110; Dower et al. (1988) Nucleic Acids Res. 16:6127; Kushner (1978) “An improved method for transformation of Escherichia coli with ColE1-derived plasmids. In Genetic Engineering: Proceedings of the International Symposium on Genetic Engineering (eds. H. W. Boyer and S. Nicosia); Mandel et al. (1970) J. Mol. Biol. 53:159; Taketo (1988) Biochim. Biophys. Acta 949:318; Escherichia], [Chassy et al. (1987) FEMS Microbiol. Lett. 44:173 Lactobacillus]; [Fiedler et al. (1988) Anal. Biochem 170:38, Pseudomonas]; [Augustin et al. (1990) FEMS Microbiol. Lett. 66:203, Staphylococcus], [Barany et al. (1980) J. Bacteriol. 144:698; Harlander (1987) “Transformation of Streptococcus lactis by electroporation, in: Streptococcal Genetics (ed. J. Ferretti and R. Curtiss III); Perry et al. (1981) Infect. Immun. 32:1295; Powell et al. (1988) Appl. Environ. Microbiol. 54:655; Somkuti et al. (1987) Proc. 4th Evr. Cong. Biotechnology 1:412, Streptococcus].

v. Yeast Expression

[0384] Yeast expression systems are also known to one of ordinary skill in the art. A yeast promoter is any DNA sequence capable of binding yeast RNA polymerase and initiating the downstream (3′) transcription of a coding sequence (eg. structural gene) into mRNA. A promoter will have a transcription initiation region which is usually placed proximal to the 5′ end of the coding sequence. This transcription initiation region usually includes an RNA polymerase binding site (the “TATA Box”) and a transcription initiation site. A yeast promoter may also have a second domain called an upstream activator sequence (UAS), which, if present, is usually distal to the structural gene. The UAS permits regulated (inducible) expression. Constitutive expression occurs in the absence of a UAS. Regulated expression may be either positive or negative, thereby either enhancing or reducing transcription.

[0385] Yeast is a fermenting organism with an active metabolic pathway, therefore sequences encoding enzymes in the metabolic pathway provide particularly useful promoter sequences. Examples include alcohol dehydrogenase (ADH) (EP-A-0 284 044), enolase, glucokinase, glucose-6-phosphate isomerase, glyceraldehyde-3-phosphate-dehydrogenase (GAP or GAPDH), hexokinase, phosphofructokinase, 3-phosphoglycerate mutase, and pyruvate kinase (PyK) (EPO-A-0 329 203). The yeast PHO5 gene, encoding acid phosphatase, also provides useful promoter sequences [Myanohara et al. (1983) Proc. Natl. Acad. Sci. USA 80:1].

[0386] In addition, synthetic promoters which do not occur in nature also function as yeast promoters. For example, UAS sequences of one yeast promoter may be joined with the transcription activation region of another yeast promoter, creating a synthetic hybrid promoter. Examples of such hybrid promoters include the ADH regulatory sequence linked to the GAP transcription activation region (U.S. Pat. Nos. 4,876,197 and 4,880,734). Other examples of hybrid promoters include promoters which consist of the regulatory sequences of either the ADH2, GAL4, GAL10, OR PHO5 genes, combined with the transcriptional activation region of a glycolytic enzyme gene such as GAP or PyK (EP-A-0 164 556). Furthermore, a yeast promoter can include naturally occurring promoters of non-yeast origin that have the ability to bind yeast RNA polymerase and initiate transcription. Examples of such promoters include, inter alia, [Cohen et al. (1980) Proc. Natl. Acad. Sci. USA 77:1078; Henikoffet al. (1981) Nature 283:835; Hollenberg et al. (1981) Curr. Topics Microbiol. Immunol. 96:119; Hollenberg et al. (1979) “The Expression of Bacterial Antibiotic Resistance Genes in the Yeast Saccharomyces cerevisiae,” in: Plasmids of Medical, Environmental and Commercial Importance (eds. K. N. Timmis and A. Puhler); Mercerau-Puigalon et al. (1980) Gene 11:163; Panthier et al. (1980) Curr. Genet. 2:109;].

[0387] A DNA molecule may be expressed intracellularly in yeast. A promoter sequence may be directly linked with the DNA molecule, in which case the first amino acid at the N-terminus of the recombinant protein will always be a methionine, which is encoded by the ATG start codon. If desired, methionine at the N-terminus may be cleaved from the protein by in vitro incubation with cyanogen bromide. Fusion proteins provide an alternative for yeast expression systems, as well as in mammalian, baculovirus, and bacterial expression systems. Usually, a DNA sequence encoding the N-terminal portion of an endogenous yeast protein, or other stable protein, is fused to the 5′ end of heterologous coding sequences. Upon expression, this construct will provide a fusion of the two amino acid sequences. For example, the yeast or human superoxide dismutase (SOD) gene, can be linked at the 5′ terminus of a foreign gene and expressed in yeast. The DNA sequence at the junction of the two amino acid sequences may or may not encode a cleavable site. See eg. EP-A-0 196 056. Another example is a ubiquitin fusion protein. Such a fusion protein is made with the ubiquitin region that preferably retains a site for a processing enzyme (eg. ubiquitin-specific processing protease) to cleave the ubiquitin from the foreign protein. Through this method, therefore, native foreign protein can be isolated (eg. WO88/024066).

[0388] Alternatively, foreign proteins can also be secreted from the cell into the growth media by creating chimeric DNA molecules that encode a fusion protein comprised of a leader sequence fragment that provide for secretion in yeast of the foreign protein. Preferably, there are processing sites encoded between the leader fragment and the foreign gene that can be cleaved either in vivo or in vitro. The leader sequence fragment usually encodes a signal peptide comprised of hydrophobic amino acids which direct the secretion of the protein from the cell.

[0389] DNA encoding suitable signal sequences can be derived from genes for secreted yeast proteins, such as the yeast invertase gene (EP-A-0 012 873; JPO. 62,096,086) and the A-factor gene (U.S. Pat. No. 4,588,684). Alternatively, leaders of non-yeast origin, such as an interferon leader, exist that also provide for secretion in yeast (EP-A-0 060 057).

[0390] A preferred class of secretion leaders are those that employ a fragment of the yeast alpha-factor gene, which contains both a “pre” signal sequence, and a “pro” region. The types of alpha-factor fragments that can be employed include the full-length pre-pro alpha factor leader (about 83 amino acid residues) as well as truncated alpha-factor leaders (usually about 25 to about 50 amino acid residues) (U.S. Pat. Nos. 4,546,083 and 4,870,008; EP-A-0 324 274). Additional leaders employing an alpha-factor leader fragment that provides for secretion include hybrid alpha-factor leaders made with a presequence of a first yeast, but a pro-region from a second yeast alphafactor. (eg. see WO 89/02463.)

[0391] Usually, transcription termination sequences recognized by yeast are regulatory regions located 3′ to the translation stop codon, and thus together with the promoter flank the coding sequence. These sequences direct the transcription of an mRNA which can be translated into the polypeptide encoded by the DNA. Examples of transcription terminator sequence and other yeast-recognized termination sequences, such as those coding for glycolytic enzymes.

[0392] Usually, the above described components, comprising a promoter, leader (if desired), coding sequence of interest, and transcription termination sequence, are put together into expression constructs. Expression constructs are often maintained in a replicon, such as an extrachromosomal element (eg. plasmids) capable of stable maintenance in a host, such as yeast or bacteria The replicon may have two replication systems, thus allowing it to be maintained, for example, in yeast for expression and in a prokaryotic host for cloning and amplification. Examples of such yeast-bacteria shuttle vectors include YEp24 [gotstein et al. (1979) Gene 8:17-24], pCl/1 [Brake et al. (1984) Proc. Natl. Acad. Sci USA 81:4642-4646], and YRp17 [Stinchcomb et al. (1982) J. Mol. Biol. 158:157]. In addition, a replicon may be either a high or low copy number plasmid. A high copy number plasmid will generally have a copy number ranging from about 5 to about 200, and usually about 10 to about 150. A host containing a high copy number plasmid will preferably have at least about 10, and more preferably at least about 20. Enter a high or low copy number vector may be selected, depending upon the effect of the vector and the foreign protein on the host. See eg. Brake et al., supra.

[0393] Alternatively, the expression constructs can be integrated into the yeast genome with an integrating vector. Integrating vectors usually contain at least one sequence homologous to a yeast chromosome that allows the vector to integrate, and preferably contain two homologous sequences flanking the expression construct. Integrations appear to result from recombinations between homologous DNA in the vector and the yeast chromosome [Orr-Weaver et al. (1983) Methods in Enzymol. 101:228-245]. An integrating vector may be directed to a specific locus in yeast by selecting the appropriate homologous sequence for inclusion in the vector. See Orr-Weaver et al., supra. One or more expression construct may integrate, possibly affecting levels of recombinant protein produced [Rine et al. (1983) Proc. Natl. Acad. Sci. USA 80:6750]. The chromosomal sequences included in the vector can occur either as a single segment in the vector, which results in the integration of the entire vector, or two segments homologous to adjacent segments in the chromosome and flanking the expression construct in the vector, which can result in the stable integration of only the expression construct.

[0394] Usually, extrachromosomal and integrating expression constructs may contain selectable markers to allow for the selection of yeast strains that have been transformed. Selectable markers may include biosynthetic genes that can be expressed in the yeast host, such as ADE2, HIS4, LEU2, TRP1, and ALG7, and the G418 resistance gene, which confer resistance in yeast cells to tunicamycin and G418, respectively. In addition, a suitable selectable marker may also provide yeast with the ability to grow in the presence of toxic compounds, such as metal. For example, the presence of CUP1 allows yeast to grow in the presence of copper ions [Butt et al. (1987) Microbiol, Rev. 51:351].

[0395] Alternatively, some of the above described components can be put together into transformation vectors. Transformation vectors are usually comprised of a selectable marker that is either maintained in a replicon or developed into an integrating vector, as described above.

[0396] Expression and transformation vectors, either extrachromosomal replicons or integrating vectors, have been developed for transformation into many yeasts. For example, expression vectors have been developed for, inter alia, the following yeasts:Candida albicans [Kurtz, et al. (1986) Mol. Cell. Biol. 6:142], Candida maltosa [Kunze, et al. (1985) J. Basic Microbiol. 25:141]. Hansenula polymorpha [Gleeson, et al. (1986) J. Gen. Microbiol. 132:3459; Roggenkamp et al. (1986) Mol. Gen. Genet. 202:302], Kluyveromyces fragilis [Das, et al. (1984) J. Bacteriol. 158:1165], Kluyveromyces lactis [De Louvencourt et al. (1983) J. Bacteriol. 154:737; Van den Berg et al. (1990) Bio/Technology 8:135], Pichia guillerimondii [Kunze et al. (1985) J. Basic Microbiol. 25:141], Pichia pastoris [Cregg, et al. (1985) Mol. Cell. Biol. 5:3376; U.S. Pat. Nos. 4,837,148 and 4,929,555], Saccharomyces cerevisiae [Hinnen et al. (1978) Proc. Natl. Acad. Sci. USA 75:1929; Ito et al. (1983) J. Bacteriol. 153:163], Schizosaccharomyces pombe [Beach and Nurse (1981) Nature 300:706], and Yarrowia lipolytica [Davidow, et al. (1985) Curr. Genet. 10:380471 Gaillardin, et al. (1985) Curr. Genet. 10:49].

[0397] Methods of introducing exogenous DNA into yeast hosts are well-known in the art, and usually include either the transformation of spheroplasts or of intact yeast cells treated with alkali cations. Transformation procedures usually vary with the yeast species to be transformed. See eg. [Kurtz et al. (1986) Mol. Cell. Biol. 6:142; Kunze et al. (1985) J. Basic Microbiol. 25:141; Candida]; [Gleeson et al. (1986) J. Gen. Microbiol. 132:3459; Roggenkamp et al. (1986) Mol. Gen. Genet. 202:302; Hansenula]; [Das et al. (1904) J. Bacteriol. 158:1165; De Louvencourt et al. (1983) J. Bacteriol. 154:1165; Van den Berg et al. (1990) Bio/Technology 8:135; Kluyveromyces]; [Cregg et al. (1985) Mol. Cell. Biol. 5:3376; Kunze et al. (1985) J. Basic Microbiol. 25:141; U.S. Pat. Nos. 4,837,148 and 4,929,555; Pichia]; [Hinnen et al. (1978) Proc. Natl. Acad. Sci. USA 75;1929; Ito et al. (1983) J. Bacteriol. 153:163 Saccharomyces]; [Beach and Nurse (1981) Nature 300:706; Schizosaccharomyces]; [Davidow et al. (1985) Curr. Genet. 10:39; Gaillardin et al. (1985) Curr. Genet. 10:49; Yarrowia].

Antibodies

[0398] As used herein, the term “antibody” refers to a polypeptide or group of polypeptides composed of at least one antibody combining site. An “antibody combining site” is the three-dimensional binding space with an internal surface shape and charge distribution complementary to the features of an epitope of an antigen, which allows a binding of the antibody with the antigen. “Antibody” includes, for example, vertebrate antibodies, hybrid antibodies, chimeric antibodies, humanised antibodies, altered antibodies, univalent antibodies, Fab proteins, and single domain antibodies.

[0399] Antibodies against the proteins of the invention are useful for affinity chromatography, immunoassays, and distinguishing/identifying Streptococcal proteins.

[0400] Antibodies to the proteins of the invention, both polyclonal and monoclonal, may be prepared by conventional methods. In general, the protein is first used to immunize a suitable animal, preferably a mouse, rat, rabbit or goat. Rabbits and goats are preferred for the preparation of polyclonal sera due to the volume of serum obtainable, and the availability of labeled anti-rabbit and anti-goat antibodies. Immunization is generally performed by mixing or emulsifying the protein in saline, preferably in an adjuvant such as Freund's complete adjuvant, and injecting the mixture or emulsion parenterally (generally subcutaneously or intramuscularly). A dose of 50-200 μg/injection is typically sufficient. Immunization is generally boosted 2-6 weeks later with one or more injections of the protein in saline, preferably using Freund's incomplete adjuvant. One may alternatively generate antibodies by in vitro immunization using methods known in the art, which for the purposes of this invention is considered equivalent to in vivo immunization. Polyclonal antisera is obtained by bleeding the immunized animal into a glass or plastic container, incubating the blood at 25° C. for one hour, followed by incubating at 4° C. for 2-18 hours. The serum is recovered by centrifugation (eg. 1,000 g for 10 minutes). About 20-50 ml per bleed may be obtained from rabbits.

[0401] Monoclonal antibodies are prepared using the standard method of Kohler & Milstein [Nature (1975) 256:495-96], or a modification thereof Typically, a mouse or rat is immunized as described above. However, rather than bleeding the animal to extract serum, the spleen (and optionally several large lymph nodes) is removed and dissociated into single cells. If desired, the spleen cells may be screened (after removal of nonspecifically adherent cells) by applying a cell suspension to a plate or well coated with the protein antigen. B-cells expressing membrane-bound immunoglobulin specific for the antigen bind to the plate, and are not rinsed away with the rest of the suspension. Resulting B-cells, or all dissociated spleen cells, are then induced to fuse with myeloma cells to form hybridomas, and are cultured in a selective medium (eg. hypoxanthine, aminopterin, thymidine medium, “HAT”). The resulting hybridomas are plated by limiting dilution, and are assayed for production of antibodies which bind specifically to the immunizing antigen (and which do not bind to unrelated antigens). The selected MAb-secreting hybridomas are then cultured either in vitro (eg. in tissue culture bottles or hollow fiber reactors), or in vivo (as ascites in mice). If desired, the antibodies (whether polyclonal or monoclonal) may be labeled using conventional techniques. Suitable labels include fluorophores, chromophores, radioactive atoms (particularly ³²P and ¹²⁵I), electron-dense reagents, enzymes, and ligands having specific binding partners. Enzymes are typically detected by their activity. For example, horseradish peroxidase is usually detected by its ability to convert 3,3′,5,5′-tetramethylbenzidine (TMB) to a blue pigment, quantifiable with a spectrophotometer. “Specific binding partner” refers to a protein capable of binding a ligand molecule with high specificity, as for example in the case of an antigen and a monoclonal antibody specific therefor. Other specific binding partners include biotin and avidin or streptavidin, IgG and protein A, and the numerous receptor-ligand couples known in the art. It should be understood that the above description is not meant to categorize the various labels into distinct classes, as the same label may serve in several different modes. For example, ¹²⁵I may serve as a radioactive label or as an electron-dense reagent. HRP may serve as enzyme or as antigen for a MAb. Further, one may combine various labels for desired effect. For example, MAbs and avidin also require labels in the practice of this invention: thus, one might label a MAb with biotin, and detect its presence with avidin labeled with ¹²⁵I, or with an anti-biotin MAb labeled with HRP. Other permutations and possibilities will be readily apparent to those of ordinary skill in the art, and are considered as equivalents within the scope of the instant invention.

Pharmaceutical Compositions

[0402] Pharmaceutical compositions can comprise either polypeptides, antibodies, or nucleic acid of the invention. The pharmaceutical compositions will comprise a therapeutically effective amount of either polypeptides, antibodies, or polynucleotides of the claimed invention.

[0403] The term “therapeutically effective amount” as used herein refers to an amount of a therapeutic agent to treat, ameliorate, or prevent a desired disease or condition, or to exhibit a detectable therapeutic or preventative effect. The effect can be detected by, for example, chemical markers or antigen levels. Therapeutic effects also include reduction in physical symptoms, such as decreased body temperature. The precise effective amount for a subject will depend upon the subject's size and health, the nature and extent of the condition, and the therapeutics or combination of therapeutics selected for administration. Thus, it is not useful to specify an exact effective amount in advance. However, the effective amount for a given situation can be determined by routine experimentation and is within the judgement of the clinician. For purposes of the present invention, an effective dose will be from about 0.01 mg/kg to 50 mg/kg or 0.05 mg/kg to about 10 mg/kg of the DNA constructs in the individual to which it is administered.

[0404] A pharmaceutical composition can also contain a pharmaceutically acceptable carrier. The term “pharmaceutically acceptable carrier” refers to a carrier for administration of a therapeutic agent, such as antibodies or a polypeptide, genes, and other therapeutic agents. The term refers to any pharmaceutical carrier that does not itself induce the production of antibodies harmful to the individual receiving the composition, and which may be administered without undue toxicity. Suitable carriers may be large, slowly metabolized macromolecules such as proteins, polysaccharides, polylactic acids, polyglycolic acids, polymeric amino acids, amino acid copolymers, and inactive virus particles. Such carriers are well known to those of ordinary skill in the art.

[0405] Pharmaceutically acceptable salts can be used therein, for example, mineral acid salts such as hydrochlorides, hydrobromides, phosphates, sulfates, and the like; and the salts of organic acids such as acetates, propionates, malonates, benzoates, and the like. A thorough discussion of pharmaceutically acceptable excipients is available in Remington's Pharmaceutical Sciences (Mack Pub. Co., N.J. 1991). Pharmaceutically acceptable carriers in therapeutic compositions may contain liquids such as water, saline, glycerol and ethanol. Additionally, auxiliary substances, such as wetting or emulsifying agents, pH buffering substances, and the like, may be present in such vehicles. Typically, the therapeutic compositions are prepared as injectables, either as liquid solutions or suspensions; solid forms suitable for solution in, or suspension in, liquid vehicles prior to injection may also be prepared. Liposomes are included within the definition of a pharmaceutically acceptable carrier.

Delivery Methods

[0406] Once formulated, the compositions of the invention can be administered directly to the subject. The subjects to be treated can be animals; in particular, human subjects can be treated.

[0407] Direct delivery of the compositions will generally be accomplished by injection, either subcutaneously, intraperitoneally, intravenously or intramuscularly or delivered to the interstitial space of a tissue. The compositions can also be administered into a lesion. Other modes of administration include oral and pulmonary administration, suppositories, and transdermal or transcutaneous applications (eg. see WO98/20734), needles, and gene guns or hyposprays. Dosage treatment may be a single dose schedule or a multiple dose schedule.

[0408] See also Delivery Strategies for Antisense Oligonucleotide Therapeutics (ed. Akhtar) ISBN 0849347785.

Vaccines

[0409] Vaccines according to the invention may either be prophylactic (ie. to prevent infection) or therapeutic (ie. to treat disease after infection).

[0410] Such vaccines comprise immunising antigen(s), immunogen(s), polypeptide(s), protein(s) or nucleic acid, usually in combination with “pharmaceutically acceptable carriers,” which include any carrier that does not itself induce the production of antibodies harmful to the individual receiving the composition. Suitable carriers are typically large, slowly metabolized macromolecules such as proteins, polysaccharides, polylactic acids, polyglycolic acids, polymeric amino acids, amino acid copolymers, lipid aggregates (such as oil droplets or liposomes), and inactive virus particles. Such carriers are well known to those of ordinary skill in the art. Additionally, these carriers may function as immunostimulating agents (“adjuvants”). Furthermore, the antigen or immunogen may be conjugated to a bacterial toxoid, such as a toxoid from diphtheria, tetanus, cholera, H. pylori, etc. pathogens.

[0411] Vaccines of the invention may be administered in conjunction with other immunoregulatory agents. In particular, compositions will usually include an adjuvant.

[0412] Preferred further adjuvants include, but are not limited to, one or more of the following set forth below:

A. Mineral Containing Compositions

[0413] Mineral containing compositions suitable for use as adjuvants in the invention include mineral salts, such as aluminium salts and calcium salts. The invention includes mineral salts such as hydroxides (e.g. oxyhydroxides), phosphates (e.g. hydroxyphoshpates, orthophosphates), sulphates, etc. {e.g. see chapters 8 & 9 of ref. 1}), or mixtures of different mineral compounds, with the compounds taking any suitable form (e.g. gel, crystalline, amorphous, etc.), and with adsorption being preferred. The mineral containing compositions may also be formulated as a particle of metal salt. See ref. 2.

B. Oil-Emulsions

[0414] Oil-emulsion compositions suitable for use as adjuvants in the invention include squalene-water emulsions, such as MF59 (5% Squalene, 0.5% Tween 80, and 0.5% Span 85, formulated into submicron particles using a microfluidizer). See ref. 3.

[0415] Complete Freund's adjuvant (CFA) and incomplete Freund's adjuvant (IFA) may also be used as adjuvants in the invention.

C. Saponin Formulations

[0416] Saponin formulations, may also be used as adjuvants in the invention. Saponins are a heterologous group of sterol glycosides and triterpenoid glycosides that are found in the bark, leaves, stems, roots and even flowers of a wide range of plant species. Saponin from the bark of the Quillaia saponaria Molina tree have been widely studied as adjuvants. Saponin can also be commercially obtained from Smilax ornata (sarsaprilla), Gypsophilla paniculata (brides veil), and Saponaria officianalis (soap root). Saponin adjuvant formulations include purified formulations, such as QS21, as well as lipid formulations, such as ISCOMs.

[0417] Saponin compositions have been purified using High Performance Thin Layer Chromatography (HP-LC) and Reversed Phase High Performance Liquid Chromatography (RP-HPLC). Specific purified fractions using these techniques have been identified, including QS7, QS17, QS18, QS21, QH-A, QH-B and QH-C. Preferably, the saponin is QS21. A method of production of QS21 is disclosed in U.S. Pat. No. 5,057,540. Saponin formulations may also comprise a sterol, such as cholesterol (see WO 96/33739).

[0418] Combinations of saponins and cholesterols can be used to form unique particles called Immunostimulating Complexs (ISCOMs). ISCOMs typically also include a phospholipid such as phosphatidylethanolamine or phosphatidylcholine. Any known saponin can be used in ISCOMs. Preferably, the ISCOM includes one or more of Quil A, QHA and QHC. ISCOMs are further described in EP 0 109 942, WO 96/11711 and WO 96/33739. Optionally, the ISCOMS may be devoid of additional detergent. See ref 4.

[0419] A review of the development of saponin based adjuvants can be found at ref. 5.

C. Virosomes and Virus Like Particles (VLPs)

[0420] Virosomes and Virus Like Particles (VLPs) can also be used as adjuvants in the invention. These structures generally contain one or more proteins from a virus optionally combined or formulated with a phospholipid. They are generally non-pathogenic, non-replicating and generally do not contain any of the native viral genome. The viral proteins may be recombinantly produced or isolated from whole viruses. These viral proteins suitable for use in virosomes or VLPs include proteins derived from influenza virus (such as HA or NA), Hepatitis B virus (such as core or capsid proteins), Hepatitis E virus, measles virus, Sindbis virus, Rotavirus, Foot-and-Mouth Disease virus, Retrovirus, Norwalk virus, human Papilloma virus, HIV, RNA-phages, Qβ-phage (such as coat proteins), GA-phage, fr-phage, AP205 phage, and Ty (such as retrotransposon Ty protein p1). VLPs are discussed further in WO 03/024480, WO 03/024481, and Refs. 6, 7, 8 and 9. Virosomes are discussed further in, for example, Ref. 10

D. Bacterial or Microbial Derivatives

[0421] Adjuvants suitable for use in the invention include bacterial or microbial derivatives such as:

[0422] (1) Non-Toxic Derivatives of Enterobacterial Lipopolysaccharide (LPS)

[0423] Such derivatives include Monophosphoryl lipid A (MPL) and 3-O-deacylated MPL (3 dMPL). 3 dMPL is a mixture of 3 De-O-acylated monophosphoryl lipid A with 4, 5 or 6 acylated chains. A preferred “small particle” form of 3 De-O-acylated monophosphoryl lipid A is disclosed in EP 0 689 454. Such “small particles” of 3 dMPL are small enough to be sterile filtered through a 0.22 micron membrane (see EP 0 689 454). Other non-toxic LPS derivatives include monophosphoryl lipid A mimics, such as aminoalkyl glucosaminide phosphate derivatives e.g. RC-529. See Ref. 11.

[0424] (2) Lipid A Derivatives

[0425] Lipid A derivatives include derivatives of lipid A from Escherichia coli such as OM-174. OM-174 is described for example in Ref. 12 and 13.

[0426] (3) Immunostimulatory Oligonucleotides

[0427] Immunostimulatory oligonucleotides suitable for use as adjuvants in the invention include nucleotide sequences containing a CpG motif (a sequence containing an unmethylated cytosine followed by guanosine and linked by a phosphate bond). Bacterial double stranded RNA or oligonucleotides containing palindromic or poly(dg) sequences have also been shown to be immunostimulatory.

[0428] The CpG's can include nucleotide modifications/analogs such as phosphorothioate modifications and can be double-stranded or single-stranded. Optionally, the guanosine may be replaced with an analog such as 2′-deoxy-7-deazaguanosine. See ref. 14, WO 02/26757 and WO 99/62923 for examples of possible analog substitutions. The adjuvant effect of CpG oligonucleotides is further discussed in Refs. 15, 16, WO 98/40100, U.S. Pat. No. 6,207,646, U.S. Pat. No. 6,239,116, and U.S. Pat. No. 6,429,199.

[0429] The CpG sequence may be directed to TLR9, such as the motif GTCGTT or TTCGTT. See ref. 17. The CpG sequence may be specific for inducing a Th1 immune response, such as a CPG-A ODN, or it may be more specific for inducing a B cell response, such a CPG-B ODN. CPG-A and CPG-B ODNs are discussed in refs. 18, 19 and WO 01/95935. Preferably, the CpG is a CpG-A ODN.

[0430] Preferably, the CpG oligonucleotide is constructed so that the 5′ end is accessible for receptor recognition. Optionally, two CpG oligonucleotide sequences may be attached at their 3′ ends to form “immunomers”. See, for example, refs. 20, 21, 22 and WO 03/035836.

[0431] (4) ADP-Ribosylating Toxins and Detoxified Derivatives Thereof.

[0432] Bacterial ADP-ribosylating toxins and detoxified derivatives thereof may be used as adjuvants in the invention. Preferably, the protein is derived from E. coli (i.e., E. coli heat labile enterotoxin “LT), cholera (“CT”), or pertussis (“PT”). The use of detoxified ADP-ribosylating toxins as mucosal adjuvants is described in WO 95/17211 and as parenteral adjuvants in WO 98/42375. The toxin or toxoid is preferably in the form of a holotoxin, comprising both A and B subunits. Preferably, the A subunit contains a detoxifying mutation; preferably the B subunit is not mutated. Preferably, the adjuvant is a detoxified LT mutant such as LT-K63, LT-R72, and LTR192G. The use of ADP-ribosylating toxins and detoxified derivaties thereof, particularly LT-K63 and LT-R72, as adjuvants can be found in Refs. 23, 24, 25, 26, 27, 28, 29 and 30 each of which is specifically incorporated by reference herein in their entirety. Numerical reference for amino acid substitutions is preferably based on the alignments of the A and B subunits of ADP-ribosylating toxins set forth in Domenighini et al., Mol. Microbiol (1995) 15(6):1165-1167, specifically incorporated herein by reference in its entirety.

E. Human Immunomodulators

[0433] Human immunomodulators suitable for use as adjuvants in the invention include cytokines, such as interleukins (e.g. IL-1, IL-2, IL-4, IL-5, IL-6, IL-7, IL-12, etc.), interferons (e.g. interferon-?), macrophage colony stimulating factor, and tumor necrosis factor.

F. Bioadhesives and Mucoadhesives

[0434] Bioadhesives and mucoadhesives may also be used as adjuvants in the invention. Suitable bioadhesives include esterified hyaluronic acid microspheres (Ref. 31) or mucoadhesives such as cross-linked derivatives of poly(acrylic acid), polyvinyl alcohol, polyvinyl pyrollidone, polysaccharides and carboxymethylcellulose. Chitosan and derivatives thereof may also be used as adjuvants in the invention. E.g., ref. 32.

G. Microparticles

[0435] Microparticles may also be used as adjuvants in the invention. Microparticles (i.e. a particle of ˜100 nm to ˜150 μm in diameter, more preferably ˜200 nm to ˜30 μm in diameter, and most preferably ˜500 nm to ˜10 μm in diameter) formed from materials that are biodegradable and non-toxic (e.g. a poly(a-hydroxy acid), a polyhydroxybutyric acid, a polyorthoester, a polyanhydride, a polycaprolactone, etc.), with poly(lactide-co-glycolide) are preferred, optionally treated to have a negatively-charged surface (e.g. with SDS) or a positively-charged surface (e.g. with a cationic detergent, such as CTAB).

H. Liposomes

[0436] Examples of liposome formulations suitable for use as adjuvants are described in U.S. Pat. No. 6,090,406, U.S. Pat. No. 5,916,588, and EP 0 626 169.

I. Polyoxyethylene Ether and Polyoxyethylene Ester Formulations

[0437] Adjuvants suitable for use in the invention include polyoxyethylene ethers and polyoxyethylene esters. Ref. 33. Such formulations further include polyoxyethylene sorbitan ester surfactants in combination with an octoxynol (Ref. 34) as well as polyoxyethylene alkyl ethers or ester surfactants in combination with at least one additional non-ionic surfactant such as an octoxynol (Ref. 35).

[0438] Preferred polyoxyethylene ethers are selected from the following group: polyoxyethylene-9-lauryl ether (laureth 9), polyoxyethylene-9-steoryl ether, polyoxytheylene-8-steoryl ether, polyoxyethylene-4-lauryl ether, polyoxyethylene-35-lauryl ether, and polyoxyethylene-23-lauryl ether.

J. Polyphosphazene (PCPP)

[0439] PCPP formulations are described, for example, in Ref. 36 and 37.

K. Muramyl Peptides

[0440] Examples of muramyl peptides suitable for use as adjuvants in the invention include N-acetyl-muramyl-L-threonyl-D-isoglutamine (thr-MDP), N-acetyl-normuramyl-L-alanyl-D-isoglutamine (nor-MDP), and N-acetylmuramyl-L-alanyl-D-isoglutaminyl-L-alanine-2-(1′-2′-dipalmitoyl-sn-glycero-3-hydroxyphosphoryloxy)-ethylamine MTP-PE).

L. Imidazoquinolone Compounds.

[0441] Examples of imidazoquinolone compounds suitable for use adjuvants in the invention include Imiquamod and its homologues, described further in Ref. 38 and 39.

[0442] The invention may also comprise combinations of aspects of one or more of the adjuvants identified above. For example, the following adjuvant compositions may be used in the invention:
[0443] (1) a saponin and an oil-in-water emulsion (ref. 40);
[0444] (2) a saponin (e.g., QS21)+a non-toxic LPS derivative (e.g., 3 dMPL) (see WO 94/00153);
[0445] (3) a saponin (e.g., QS21)+a non-toxic LPS derivative (e.g., 3 dMPL)+a cholesterol;
[0446] (4) a saponin (e.g. QS21)+3 dMPL+IL-12 (optionally+a sterol) (Ref. 41); combinations of 3 dMPL with, for example, QS21 and/or oil-in-water emulsions (Ref. 42);
[0447] (5) SAF, containing 10% Squalane, 0.4% Tween 80, 5% pluronic-block polymer L121, and thr-MDP, either microfluidized into a submicron emulsion or vortexed to generate a larger particle size emulsion.
[0448] (6) Ribi™ adjuvant system (RAS), (Ribi Immunochem) containing 2% Squalene, 0.2% Tween 80, and one or more bacterial cell wall components from the group consisting of monophosphorylipid A (MPL), trehalose dimycolate (TDM), and cell wall skeleton (CWS), preferably MPL+CWS (Detox™); and
[0449] (7) one or more mineral salts (such as an aluminum salt)+a non-toxic derivative of LPS (such as 3 dPML).

[0450] Aluminium salts and MF59 are preferred adjuvants for parenteral immunisation. Mutant bacterial toxins are preferred mucosal adjuvants.

[0451] The immunogenic compositions (eg. the immunising antigen/immunogen/polypeptide/protein/nucleic acid, pharmaceutically acceptable carrier, and adjuvant) typically will contain diluents, such as water, saline, glycerol, ethanol, etc. Additionally, auxiliary substances, such as wetting or emulsifying agents, pH buffering substances, and the like, may be present in such vehicles.

[0452] Typically, the immunogenic compositions are prepared as injectables, either as liquid solutions or suspensions; solid forms suitable for solution in, or suspension in, liquid vehicles prior to injection may also be prepared. The preparation also may be emulsified or encapsulated in liposomes for enhanced adjuvant effect, as discussed above under pharmaceutically acceptable carriers.

[0453] Immunogenic compositions used as vaccines comprise an immunologically effective amount of the antigenic or immunogenic polypeptides, as well as any other of the above-mentioned components, as needed. By “immunologically effective amount”, it is meant that the administration of that amount to an individual, either in a single dose or as part of a series, is effective for treatment or prevention. This amount varies depending upon the health and physical condition of the individual to be treated, the taxonomic group of individual to be treated (eg. nonhuman primate, primate, etc.), the capacity of the individual's immune system to synthesize antibodies, the degree of protection desired, the formulation of the vaccine, the treating doctor's assessment of the medical situation, and other relevant factors. It is expected that the amount will fall in a relatively broad range that can be determined through routine trials.

[0454] The immunogenic compositions are conventionally administered parenterally, eg. by injection, either subcutaneously, intramuscularly, or transdermally/transcutaneously (eg. WO98/20734). Additional formulations suitable for other modes of administration include oral and pulmonary formulations, suppositories, and transdermal applications. Dosage treatment may be a single dose schedule or a multiple dose schedule. The vaccine may be administered in conjunction with other immunoregulatory agents.

[0455] As an alternative to protein-based vaccines, DNA vaccination may be used [eg. Robinson & Torres (1997) Seminars in Immunol 9:271-283; Donnelly et al. (1997) Annu Rev Immunol 15:617-648; later herein].

Gene Delivery Vehicles

[0456] Gene therapy vehicles for delivery of constructs including a coding sequence of a therapeutic of the invention, to be delivered to the mammal for expression in the mammal, can be administered either locally or systemically. These constructs can utilize viral or non-viral vector approaches in in vivo or ex vivo modality. Expression of such coding sequence can be induced using endogenous mammalian or heterologous promoters. Expression of the coding sequence in vivo can be either constitutive or regulated.

[0457] The invention includes gene delivery vehicles capable of expressing the contemplated nucleic acid sequences. The gene delivery vehicle is preferably a viral vector and, more preferably, a retroviral, adenoviral, adeno-associated viral (AAV), herpes viral, or alphavirus vector. The viral vector can also be an astrovirus, coronavirus, orthomyxovirus, papovavirus, paramyxovirus, parvovirus, picomavirus, poxvirus, or togavirus viral vector. See generally, Jolly (1994) Cancer Gene Therapy 1:51-64; Kimura (1994) Human Gene Therapy 5:845-852; Connelly (1995) Human Gene Therapy 6:185-193; and Kaplitt (1994) Nature Genetics 6:148-153.

[0458] Retroviral vectors are well known in the art and we contemplate that any retroviral gene therapy vector is employable in the invention, including B, C and D type retroviruses, xenotropic retroviruses (for example, NZB-X1, NZB-X2 and NZB9-1 (see O'Neill (1985) J. Virol. 53:160) polytropic retroviruses eg. MCF and MCF-MLV (see Kelly (1983) J. Virol. 45:291), spumaviruses and lentiviruses. See RNA Tumor Viruses, Second Edition, Cold Spring Harbor Laboratory, 1985.

[0459] Portions of the retroviral gene therapy vector may be derived from different retroviruses. For example, retrovector LTRs may be derived from a Murine Sarcoma Virus, a tRNA binding site from a Rous Sarcoma Virus, a packaging signal from a Murine Leukemia Virus, and an origin of second strand synthesis from an Avian Leukosis Virus.

[0460] These recombinant retroviral vectors may be used to generate transduction competent retroviral vector particles by introducing them into appropriate packaging cell lines (see U.S. Pat. No. 5,591,624). Retrovirus vectors can be constructed for site-specific integration into host cell DNA by incorporation of a chimeric integrase enzyme into the retroviral particle (see WO96/37626). It is preferable that the recombinant viral vector is a replication defective recombinant virus.

[0461] Packaging cell lines suitable for use with the above-described retrovirus vectors are well known in the art, are readily prepared (see WO95/30763 and WO92/05266), and can be used to create producer cell lines (also termed vector cell lines or “VCLs”) for the production of recombinant vector particles. Preferably, the packaging cell lines are made from human parent cells (eg. HT1080 cells) or mink parent cell lines, which eliminates inactivation in human serum.

[0462] Preferred retroviruses for the construction of retroviral gene therapy vectors include Avian Leukosis Virus, Bovine Leukemia, Virus, Murine Leukemia Virus, Mink-Cell Focus-Inducing Virus, Murine Sarcoma Virus, Reticuloendotheliosis Virus and Rous Sarcoma Virus. Particularly preferred Murine Leukemia Viruses include 4070A and 1504A (Hartley and Rowe (1976) J Virol 19:19-25), Abelson (ATCC No. VR-999), Friend (ATCC No. VR-245), Graffi, Gross (ATCC Nol VR-590), Kirsten, Harvey Sarcoma Virus and Rauscher (ATCC No. VR-998) and Moloney Murine Leukemia Virus (ATCC No. VR-190). Such retroviruses may be obtained from depositories or collections such as the American Type Culture Collection (“ATCC”) in Rockville, Md. or isolated from known sources using commonly available techniques. Exemplary known retroviral gene therapy vectors employable in this invention include those described in patent applications GB2200651, EP0415731, EP0345242, EP0334301, WO89/02468; WO89/05349, WO89/09271, WO90/02806, WO90/07936, WO94/03622, WO93/25698, WO93/25234, WO93/11230, WO93/10218, WO91/02805, WO91/02825, WO95/07994, U.S. Pat. No. 5,219,740, U.S. Pat. No. 4,405,712, U.S. 4,861,719, U.S. Pat. No. 4,980,289, U.S. Pat. No. 4,777,127, U.S. Pat. No. 5,591,624. See also Vile (1993) Cancer Res 53:3860-3864; Vile (1993) Cancer Res 53:962-967; Ram (1993) Cancer Res 53 (1993) 83-88; Takamiya (1992) J. Neurosci Res 33:493-503; Baba (1993) J Neurosurg 79:729-735; Mann (1983) Cell 33:153; Cane (1984) Proc Natl Acad Sci 81:6349; and Miller (1990) Human Gene Therapy 1.

[0463] Human adenoviral gene therapy vectors are also known in the art and employable in this invention. See, for example, Berkner (1988) Biotechniques 6:616 and Rosenfeld (1991) Science 252:431, and WO93/07283, WO93/06223, and WO93/07282. Exemplary known adenoviral gene therapy vectors employable in this invention include those described in the above referenced documents and in WO94/12649, WO93/03769, WO93/19191, WO94/28938, WO95/11984, WO95/00655, WO95/27071, WO95/29993, WO95/34671, WO96/05320, WO94/08026, WO94/11506, WO93/06223, WO94/24299, WO95/14102, WO95/24297, WO95/02697, WO94/28152, WO94/24299, WO95/09241, WO95/25807, WO95/05835, WO94/18922 and WO95/09654. Alternatively, administration of DNA linked to killed adenovirus as described in Curiel (1992) Hum. Gene Ther. 3:147-154 may be employed. The gene delivery vehicles of the invention also include adenovirus associated virus (AAV) vectors. Leading and preferred examples of such vectors for use in this invention are the AAV-2 based vectors disclosed in Srivastava, WO93/09239. Most preferred AAV vectors comprise the two AAV inverted terminal repeats in which the native D-sequences are modified by substitution of nucleotides, such that at least 5 native nucleotides and up to 18 native nucleotides, preferably at least 10 native nucleotides up to 18 native nucleotides, most preferably 10 native nucleotides are retained and the remaining nucleotides of the D-sequence are deleted or replaced with non-native nucleotides. The native D-sequences of the AAV inverted terminal repeats are sequences of 20 consecutive nucleotides in each AAV inverted terminal repeat (ie. there is one sequence at each end) which are not involved in HP formation. The non-native replacement nucleotide may be any nucleotide other than the nucleotide found in the native D-sequence in the same position. Other employable exemplary AAV vectors are pWP-19, pWN-1, both of which are disclosed in Nahreini (1993) Gene 124:257-262. Another example of such an AAV vector is psub201 (see Samulski (1987) J. Virol. 61:3096). Another exemplary AAV vector is the Double-D ITR vector. Construction of the Double-D ITR vector is disclosed in U.S. Pat. No. 5,478,745. Still other vectors are those disclosed in Carter U.S. Pat. No. 4,797,368 and Muzyczka U.S. Pat. No. 5,139,941, Chartejee U.S. Pat. No. 5,474,935, and Kotin WO94/288157. Yet a further example of an AAV vector employable in this invention is SSV9AFABTKneo, which contains the AFP enhancer and albumin promoter and directs expression predominantly in the liver. Its structure and construction are disclosed in Su (1996) Human Gene Therapy 7:463-470. Additional AAV gene therapy vectors are described in U.S. Pat. No. 5,354,678, U.S. Pat. No. 5,173,414, U.S. Pat. No. 5,139,941, and U.S. Pat. No. 5,252,479.

[0464] The gene therapy vectors of the invention also include herpes vectors. Leading and preferred examples are herpes simplex virus vectors containing a sequence encoding a thymidine kinase polypeptide such as those disclosed in U.S. Pat. No. 5,288,641 and EP0176170 (Roizman). Additional exemplary herpes simplex virus vectors include HFEM/ICP6-LacZ disclosed in WO95/04139 (Wistar Institute), pHSVlac described in Geller (1988) Science 241:1667-1669 and in WO90/09441 and WO92/07945, HSV Us3:pgC-lacZ described in Fink (1992) Human Gene Therapy 3:11-19 and HSV 7134, 2 RH 105 and GAL4 described in EP 0453242 (Breakefield), and those deposited with the ATCC with accession numbers VR-977 and VR-260.

[0465] Also contemplated are alpha virus gene therapy vectors that can be employed in this invention. Preferred alpha virus vectors are Sindbis viruses vectors. Togaviruses, Semliki Forest virus (ATCC VR-67; ATCC VR-1247), Middleberg virus (ATCC VR-370), Ross River virus (ATCC VR-373; ATCC VR-1246), Venezuelan equine encephalitis virus (ATCC VR923; ATCC VR-1250; ATCC VR-1249; ATCC VR-532), and those described in U.S. Pat. Nos. 5,091,309, 5,217,879, and WO92/10578. More particularly, those alpha virus vectors described in U.S. Ser. No. 08/405,627, filed Mar. 15, 1995,WO94/21792, WO92/10578, WO95/07994, U.S. Pat. No. 5,091,309 and U.S. Pat. No. 5,217,879 are employable. Such alpha viruses may be obtained from depositories or collections such as the ATCC in Rockville, Md. or isolated from known sources using commonly available techniques. Preferably, alphavirus vectors with reduced cytotoxicity are used (see U.S. Ser. No. 08/679640).

[0466] DNA vector systems such as eukaryotic layered expression systems are also useful for expressing the nucleic acids of the invention. See WO95/07994 for a detailed description of eukaryotic layered expression systems. Preferably, the eukaryotic layered expression systems of the invention are derived from alphavirus vectors and most preferably from Sindbis viral vectors.

[0467] Other viral vectors suitable for use in the present invention include those derived from poliovirus, for example ATCC VR-58 and those described in Evans, Nature 339 (1989) 385 and Sabin (1973) J. Biol. Standardization 1:115; rhinovirus, for example ATCC VR-1110 and those described in Arnold (1990) J Cell Biochem L401; pox viruses such as canary pox virus or vaccinia virus, for example ATCC VR-111 and ATCC VR-2010 and those described in Fisher-Hoch (1989) Proc Natl Acad Sci 86:317; Flexner (1989) Ann NY Acad Sci 569:86, Flexner (1990) Vaccine 8:17; in U.S. Pat. No. 4,603,112 and U.S. Pat. No. 4,769,330 and WO89/01973; SV40 virus, for example ATCC VR-305 and those described in Mulligan (1979) Nature 277:108 and Madzak (1992) J Gen Virol 73:1533; influenza virus, for example ATCC VR-797 and recombinant influenza viruses made employing reverse genetics techniques as described in U.S. Pat. No. 5,166,057 and in Enami (1990) Proc Natl Acad Sci 87:3802-3805; Enami & Palese (1991) J Virol 65:2711-2713 and Luytjes (1989) Cell 59:110, (see also McMichael (1983) NEJ Med 309:13, and Yap (1978) Nature 273:238 and Nature (1979) 277:108); human immunodeficiency virus as described in EP-0386882 and in Buchschacher (1992) J. Virol. 66:2731; measles virus, for example ATCC VR-67 and VR-1247 and those described in EP-0440219; Aura virus, for example ATCC VR-368; Bebaru virus, for example ATCC VR-600 and ATCC VR-1240; Cabassou virus, for example ATCC VR-922; Chikungunya virus, for example ATCC VR-64 and ATCC VR-1241; Fort Morgan Virus, for example ATCC VR-924; Getah virus, for example ATCC VR-369 and ATCC VR-1243; Kyzylagach virus, for example ATCC VR-927; Mayaro virus, for example ATCC VR-66; Mucambo virus, for example ATCC VR-580 and ATCC VR-1244; Ndumu virus, for example ATCC VR-371; Pixuna virus, for example ATCC VR-372 and ATCC VR-1245; Tonate virus, for example ATCC VR-925; Triniti virus, for example ATCC VR-469; Una virus, for example ATCC VR-374; Whataroa virus, for example ATCC VR-926; Y-62-33 virus, for example ATCC VR-375; O'Nyong virus, Eastern encephalitis virus, for example ATCC VR-65 and ATCC VR-1242; Western encephalitis virus, for example ATCC VR-70, ATCC VR-1251, ATCC VR-622 and ATCC VR-1252; and coronavirus, for example ATCC VR-740 and those described in Hamre (1966) Proc Soc Exp Biol Med 121:190.

[0468] Delivery of the compositions of this invention into cells is not limited to the above mentioned viral vectors. Other delivery methods and media may be employed such as, for example, nucleic acid expression vectors, polycationic condensed DNA linked or unlinked to killed adenovirus alone, for example see U.S. Ser. No. 08/366,787, filed Dec. 30, 1994 and Curiel (1992) Hum Gene Ther 3:147-154 ligand linked DNA, for example see Wu (1989) J Biol Chem 264:16985-16987, eucaryotic cell delivery vehicles cells, for example see U.S. Ser. No. 08/240,030, filed May 9, 1994, and U.S. Ser. No. 08/404,796, deposition of photopolymerized hydrogel materials, hand-held gene transfer particle gun, as described in U.S. Pat. No. 5,149,655, ionizing radiation as described in U.S. Pat. No. 5,206,152 and in WO92/11033, nucleic charge neutralization or fusion with cell membranes. Additional approaches are described in Philip (1994) Mol Cell Biol 14:2411-2418 and in Woffendin (1994) Proc Natl Acad Sci 91:1581-1585.

[0469] Particle mediated gene transfer may be employed, for example see U.S. Ser. No. 60/023,867. Briefly, the sequence can be inserted into conventional vectors that contain conventional control sequences for high level expression, and then incubated with synthetic gene transfer molecules such as polymeric DNA-binding cations like polylysine, protamine, and albumin, linked to cell targeting ligands such as asialoorosomucoid, as described in Wu & Wu (1987) J. Biol. Chem. 262:4429-4432, insulin as described in Hucked (1990) Biochem Pharmacol 40:253-263, galactose as described in Plank (1992) Bioconjugate Chem 3:533-539, lactose or transferrin.

[0470] Naked DNA may also be employed. Exemplary naked DNA introduction methods are described in WO 90/11092 and U.S. Pat. No. 5,580,859. Uptake efficiency may be improved using biodegradable latex beads. DNA coated latex beads are efficiently transported into cells after endocytosis initiation by the beads. The method may be improved further by treatment of the beads to increase hydrophobicity and thereby facilitate disruption of the endosome and release of the DNA into the cytoplasm.

[0471] Liposomes that can act as gene delivery vehicles are described in U.S. Pat. No. 5,422,120, WO95/13796, WO94/23697, WO91/14445 and EP-524,968. As described in U.S. Ser. No. 60/023,867, on non-viral delivery, the nucleic acid sequences encoding a polypeptide can be inserted into conventional vectors that contain conventional control sequences for high level expression, and then be incubated with synthetic gene transfer molecules such as polymeric DNA-binding cations like polylysine, protamine, and albumin, linked to cell targeting ligands such as asialoorosomucoid, insulin, galactose, lactose, or transferrin. Other delivery systems include the use of liposomes to encapsulate DNA comprising the gene under the control of a variety of tissue-specific or ubiquitously-active promoters. Further non-viral delivery suitable for use includes mechanical delivery systems such as the approach described in Woffendin et al (1994) Proc. Natl. Acad. Sci. USA 91(24):11581-11585. Moreover, the coding sequence and the product of expression of such can be delivered through deposition of photopolymerized hydrogel materials. Other conventional methods for gene delivery that can be used for delivery of the coding sequence include, for example, use of hand-held gene transfer particle gun, as described in U.S. Pat. No. 5,149,655; use of ionizing radiation for activating transferred gene, as described in U.S. Pat. No. 5,206,152 and WO92/11033

[0472] Exemplary liposome and polycationic gene delivery vehicles are those described in U.S. Pat. Nos. 5,422,120 and 4,762,915; in WO 95/13796; WO94/23697; and WO91/14445; in EP-0524968; and in Stryer, Biochemistry, pages 236-240 (1975) W.H. Freeman, San Francisco; Szoka (1980) Biochem Biophys Acta 600:1; Bayer (1979) Biochem Biophys Acta 550:464; Rivnay (1987) Meth Enzymol 149:119; Wang (1987) Proc Natl Acad Sci 84:7851; Plant (1989) Anal Biochem 176:420.

[0473] A polynucleotide composition can comprises therapeutically effective amount of a gene therapy vehicle, as the term is defined above. For purposes of the present invention, an effective dose will be from about 0.01 mg/kg to 50 mg/kg or 0.05 mg/kg to about 10 mg/kg of the DNA constructs in the individual to which it is administered.

Delivery Methods

[0474] Once formulated, the polynucleotide compositions of the invention can be administered (1) directly to the subject; (2) delivered ex vivo, to cells derived from the subject; or (3) in vitro for expression of recombinant proteins. The subjects to be treated can be mammals or birds. Also, human subjects can be treated.

[0475] Direct delivery of the compositions will generally be accomplished by injection, either subcutaneously, intraperitoneally, intravenously or intramuscularly or delivered to the interstitial space of a tissue. The compositions can also be administered into a lesion. Other modes of administration include oral and pulmonary administration, suppositories, and transdermal or transcutaneous applications (eg. see WO98/20734), needles, and gene guns or hyposprays. Dosage treatment may be a single dose schedule or a multiple dose schedule.

[0476] Methods for the ex vivo delivery and reimplantation of transformed cells into a subject are known in the art and described in eg. WO93/14778. Examples of cells useful in ex vivo applications include, for example, stem cells, particularly hematopoetic, lymph cells, macrophages, dendritic cells, or tumor cells. Generally, delivery of nucleic acids for both ex vivo and in vitro applications can be accomplished by the following procedures, for example, dextran-mediated transfection, calcium phosphate precipitation, polybrene mediated transfection, protoplast fusion, electroporation, encapsulation of the polynucleotide(s) in liposomes, and direct microinjection of the DNA into nuclei, all well known in the art.

Polynucleotide and Polypeptide Pharmaceutical Compositions

[0477] The terms “polynucleotide” and “nucleic acid”, used interchangeably herein, In addition to the pharmaceutically acceptable carriers and salts described above, the following additional agents can be used with polynucleotide and/or polypeptide compositions.

A.Polypeptides

[0478] One example are polypeptides which include, without limitation: asioloorosomucoid (ASOR); transferrin; asialoglycoproteins; antibodies; antibody fragments; ferritin; interleukins; interferons, granulocyte, macrophage colony stimulating factor (GM-CSF), granulocyte colony stimulating factor (G-CSF), macrophage colony stimulating factor (M-CSF), stem cell factor and erythropoietin. Viral antigens, such as envelope proteins, can also be used. Also, proteins from other invasive organisms, such as the 17 amino acid peptide from the circumsporozoite protein of plasmodium falciparum known as RII.

B.Hormones, Vitamins, etc.

[0479] Other groups that can be included are, for example: hormones, steroids, androgens, estrogens, thyroid hormone, or vitamins, folic acid.

C.Polyalkylenes, Polysaccharides, etc.

[0480] Also, polyalkylene glycol can be included with the desired polynucleotides/polypeptides. In a preferred embodiment, the polyalkylene glycol is polyethlylene glycol. In addition, mono-, di-, or polysaccharides can be included. In a preferred embodiment of this aspect, the polysaccharide is dextran or DEAE-dextran. Also, chitosan and poly(lactide-co-glycolide)

D.Lipids, and Liposomes

[0481] The desired polynucleotide/polypeptide can also be encapsulated in lipids or packaged in liposomes prior to delivery to the subject or to cells derived therefrom.

[0482] Lipid encapsulation is generally accomplished using liposomes which are able to stably bind or entrap and retain nucleic acid. The ratio of condensed polynucleotide to lipid preparation can vary but will generally be around 1:1 (mg DNA:micromoles lipid), or more of lipid. For a review of the use of liposomes as carriers for delivery of nucleic acids, see, Hug and Sleight (1991) Biochim. Biophys. Acta. 1097:1-17; Straubinger (1983) Meth. Enzymol. 101:512-527.

[0483] Liposomal preparations for use in the present invention include cationic (positively charged), anionic (negatively charged) and neutral preparations. Cationic liposomes have been shown to mediate intracellular delivery of plasmid DNA (Felgner (1987) Proc. Natl. Acad. Sci. USA 84:7413-7416); mRNA (Malone (1989) Proc. Natl. Acad. Sci. USA 86:6077-6081); and purified transcription factors (Debs (1990) J. Biol. Chem. 265:10189-10192), in functional form.

[0484] Cationic liposomes are readily available. For example, N[1-2,3-dioleyloxy)propyl]-N,N,N-triethylammonium (DOTMA) liposomes are available under the trademark Lipofectin, from GIBCO BRL, Grand Island, N.Y. (See, also, Felgner supra). Other commercially available liposomes include transfectace (DDAB/DOPE) and DOTAP/DOPE (Boerhinger). Other cationic liposomes can be prepared from readily available materials using techniques well known in the art. See, eg. Szoka (1978) Proc. Natl. Acad. Sci. USA 75:4194-4198; WO90/11092 for a description of the synthesis of DOTAP (1,2-bis(oleoyloxy)-3-(trimethylammonio)propane) liposomes. Similarly, anionic and neutral liposomes are readily available, such as from Avanti Polar Lipids (Birmingham, Ala.), or can be easily prepared using readily available materials. Such materials include phosphatidyl choline, cholesterol, phosphatidyl ethanolamine, dioleoylphosphatidyl choline (DOPC), dioleoylphosphatidyl glycerol (DOPG), dioleoylphoshatidyl ethanolamine (DOPE), among others. These materials can also be mixed with the DOTMA and DOTAP starting materials in appropriate ratios. Methods for making liposomes using these materials are well known in the art.

[0485] The liposomes can comprise multilammelar vesicles (MLVs), small unilamellar vesicles (SUVs), or large unilamellar vesicles (LUVs). The various liposome-nucleic acid complexes are prepared using methods known in the art. See eg. Straubinger (1983) Meth. Immunol. 101:512-527; Szoka (1978) Proc. Natl. Acad. Sci. USA 75:4194-4198; Papahadjopoulos (1975) Biochim. Biophys. Acta 394:483; Wilson (1979) Cell 17:77); Deamer & Bangham (1976) Biochim. Biophys. Acta 443:629; Ostro (1977) Biochem. Biophys. Res. Commun. 76:836; Fraley (1979) Proc. Natl. Acad. Sci. USA 76:3348); Enoch & Strittmatter (1979) Proc. Natl. Acad. Sci. USA 76:145; Fraley (1980) J. Biol. Chem. (1980) 255:10431; Szoka & Papahadjopoulos (1978) Proc. Natl. Acad. Sci. USA 75:145; and Schaefer-Ridder (1982) Science 215:166.

E.Lipoproteins

[0486] In addition, lipoproteins can be included with the polynucleotide/polypeptide to be delivered. Examples of lipoproteins to be utilized include: chylomicrons, HDL, IDL, LDL, and VLDL. Mutants, fragments, or fusions of these proteins can also be used. Also, modifications of naturally occurring lipoproteins can be used, such as acetylated LDL. These lipoproteins can target the delivery of polynucleotides to cells expressing lipoprotein receptors. Preferably, if lipoproteins are including with the polynucleotide to be delivered, no other targeting ligand is included in the composition.

[0487] Naturally occurring lipoproteins comprise a lipid and a protein portion. The protein portion are known as apoproteins. At the present, apoproteins A, B, C, D, and E have been isolated and identified. At least two of these contain several proteins, designated by Roman numerals, AI, AII, AIV; CI, CII, CIII.

[0488] A lipoprotein can comprise more than one apoprotein. For example, naturally occurring chylomicrons comprises of A, B, C & E, over time these lipoproteins lose A and acquire C & E. VLDL comprises A, B, C & E apoproteins, LDL comprises apoprotein B; and HDL comprises apoproteins A, C, & E.

[0489] The amino acid of these apoproteins are known and are described in, for example, Breslow (1985) Annu Rev. Biochem 54:699; Law (1986) Adv. Exp Med. Biol. 151:162; Chen (1986) J Biol Chem 261:12918; Kane (1980) Proc Natl Acad Sci USA 77:2465; and Utermann (1984) Hum Genet 65:232.

[0490] Lipoproteins contain a variety of lipids including, triglycerides, cholesterol (free and esters), and phospholipids. The composition of the lipids varies in naturally occurring lipoproteins. For example, chylomicrons comprise mainly triglycerides. A more detailed description of the lipid content of naturally occurring lipoproteins can be found, for example, in Meth. Enzymol. 128 (1986). The composition of the lipids are chosen to aid in conformation of the apoprotein for receptor binding activity. The composition of lipids can also be chosen to facilitate hydrophobic interaction and association with the polynucleotide binding molecule.

[0491] Naturally occurring lipoproteins can be isolated from serum by ultracentrifugation, for instance. Such methods are described in Meth. Enzymol. (supra); Pitas (1980) J. Biochem. 255:5454-5460 and Mahey (1979) J Clin. Invest 64:743-750. Lipoproteins can also be produced by in vitro or recombinant methods by expression of the apoprotein genes in a desired host cell. See, for example, Atkinson (1986) Annu Rev Biophys Chem 15:403 and Radding (1958) Biochim Biophys Acta 30: 443. Lipoproteins can also be purchased from commercial suppliers, such as Biomedical Techniologies, Inc., Stoughton, Mass., USA. Further description of lipoproteins can be found in Zuckermann et al. PCT/US97/14465.

F.Polycationic Agents

[0492] Polycationic agents can be included, with or without lipoprotein, in a composition with the desired polynucleotide/polypeptide to be delivered.

[0493] Polycationic agents, typically, exhibit a net positive charge at physiological relevant pH and are capable of neutralizing the electrical charge of nucleic acids to facilitate delivery to a desired location. These agents have both in vitro, ex vivo, and in vivo applications. Polycationic agents can be used to deliver nucleic acids to a living subject either intramuscularly, subcutaneously, etc.

[0494] The following are examples of useful polypeptides as polycationic agents: polylysine, polyarginine, polyornithine, and protamine. Other examples include histones, protamines, human serum albumin, DNA binding proteins, non-histone chromosomal proteins, coat proteins from DNA viruses, such as (X174, transcriptional factors also contain domains that bind DNA and therefore may be useful as nucleic aid condensing agents. Briefly, transcriptional factors such as C/CEBP, c-jun, c-fos, AP-1, AP-2, AP-3, CPF, Prot-1, Sp-1, Oct-1, Oct-2, CREP, and TFIID contain basic domains that bind DNA sequences.

[0495] Organic polycationic agents include: spermine, spermidine, and purtrescine.

[0496] The dimensions and of the physical properties of a polycationic agent can be extrapolated from the list above, to construct other polypeptide polycationic agents or to produce synthetic polycationic agents. Synthetic polycationic agents which are useful include, for example, DEAE-dextran, polybrene. Lipofectin™, and lipofectAMINE™ are monomers that form polycationic complexes when combined with polynucleotides/polypeptides.

Immunodiagnostic Assays

[0497] Streptococcus antigens of the invention can be used in immunoassays to detect antibody levels (or, conversely, anti-Streptococcus antibodies can be used to detect antigen levels). Immunoassays based on well defined, recombinant antigens can be developed to replace invasive diagnostics methods. Antibodies to Streptococcus proteins within biological samples, including for example, blood or serum samples, can be detected. Design of the immunoassays is subject to a great deal of variation, and a variety of these are known in the art. Protocols for the immunoassay may be based, for example, upon competition, or direct reaction, or sandwich type assays. Protocols may also, for example, use solid supports, or may be by immunoprecipitation. Most assays involve the use of labeled antibody or polypeptide; the labels may be, for example, fluorescent, chemiluminescent, radioactive, or dye molecules. Assays which amplify the signals from the probe are also known; examples of which are assays which utilize biotin and avidin, and enzyme-labeled and mediated immunoassays, such as ELISA assays.

[0498] Kits suitable for immunodiagnosis and containing the appropriate labeled reagents are constructed by packaging the appropriate materials, including the compositions of the invention, in suitable containers, along with the remaining reagents and materials (for example, suitable buffers, salt solutions, etc.) required for the conduct of the assay, as well as suitable set of assay instructions.

Use of Polypeptides to Screen for Peptide Analogs and Antagonists

[0499] Polypeptides encoded by the instant polynucleotides and corresponding full length genes can be used to screen peptide libraries to identify binding partners, such as receptors, from within the library. Peptide libraries can be synthesized according to methods known in the art (e.g. U.S. Pat. No. 5,010,175; WO91/17823). Agonists or antagonists of the polypeptides if the invention can be screened using any available method known in the art, such as signal transduction, antibody binding, receptor binding, mitogenic assays, chemotaxis assays, etc. The assay conditions ideally should resemble the conditions under which the native activity is exhibited in vivo, that is, under physiologic pH, temperature, and ionic strength. Suitable agonists or antagonists will exhibit strong inhibition or enhancement of the native activity at concentrations that do not cause toxic side effects in the subject. Agonists or antagonists that compete for binding to the native polypeptide can require concentrations equal to or greater than the native concentration, while inhibitors capable of binding irreversibly to the polypeptide can be added in concentrations on the order of the native concentration.

[0500] Such screening and experimentation can lead to identification of a polypeptide binding partner, such as a receptor, encoded by a gene or a cDNA corresponding to a polynucleotide described herein, and at least one peptide agonist or antagonist of the binding partner. Such agonists and antagonists can be used to modulate, enhance, or inhibit receptor function in cells to which the receptor is native, or in cells that possess the receptor as a result of genetic engineering. Further, if the receptor shares biologically important characteristics with a known receptor, information about agonist/antagonist binding can facilitate development of improved agonists/antagonists of the known receptor.

Identification of Anti-Bacterial Agents

Drug Screening Assays

[0501] Of particular interest in the present invention is the identification of agents that have activity in modulating expression of one or more of the adhesion-specific genes described herein, so as to inhibit infection and/or disease. Of particular interest are screening assays for agents that have a low toxicity for human cells. The term “agent” as used herein describes any molecule with the capability of altering or mimicking the expression or physiological function of a gene product of a differentially expressed gene. Generally a plurality of assay mixtures are run in parallel with different agent concentrations to obtain a differential response to the various concentrations. Typically, one of these concentrations serves as a negative control i.e. at zero concentration or below the level of detection.

[0502] Candidate agents encompass numerous chemical classes, including, but not limited to, organic molecules (e.g. small organic compounds having a molecular weight of more than 50 and less than about 2,500 daltons), peptides, antisense polynucleotides, and ribozymes, and the like. Candidate agents can comprise functional groups necessary for structural interaction with proteins, particularly hydrogen bonding, and typically include at least an amine, carbonyl, hydroxyl or carboxyl group, preferably at least two of the functional chemical groups. The candidate agents often comprise cyclical carbon or heterocyclic structures and/or aromatic or polyaromatic structures substituted with one or more of the above functional groups. Candidate agents are also found among biomolecules including, but not limited to: polynucleotides, peptides, saccharides, fatty acids, steroids, purines, pyrimidines, derivatives, structural analogs or combinations thereof.

[0503] Candidate agents are obtained from a wide variety of sources including libraries of synthetic or natural compounds. For example, numerous means are available for random and directed synthesis of a wide variety of organic compounds and biomolecules, including expression of randomized oligonucleotides and oligopeptides. Alternatively, libraries of natural compounds in the form of bacterial, fungal, plant and animal extracts are available or readily produced. Additionally, natural or synthetically produced libraries and compounds are readily modified through conventional chemical, physical and biochemical means, and may be used to produce combinatorial libraries. Known pharmacological agents may be subjected to directed or random chemical modifications, such as acylation, alkylation, esterification, amidification, etc. to produce structural analogs.

Screening of Candidate Agents In Vitro

[0504] A wide variety of in vitro assays may be used to screen candidate agents for the desired biological activity, including, but not limited to, labeled in vitro protein-protein binding assays, protein-DNA binding assays (e.g. to identify agents that affect expression), electrophoretic mobility shift assays, immunoassays for protein binding, and the like. For example, by providing for the production of large amounts of a differentially expressed polypeptide, one can identify ligands or substrates that bind to, modulate or mimic the action of the polypeptide. The purified polypeptide may also be used for determination of three-dimensional crystal structure, which can be used for modeling intermolecular interactions, transcriptional regulation, etc.

[0505] The screening assay can be a binding assay, wherein one or more of the molecules may be joined to a label, and the label directly or indirectly provide a detectable signal. Various labels include radioisotopes, fluorescers, chemiluminescers, enzymes, specific binding molecules, particles, e.g. magnetic particles, and the like. Specific binding molecules include pairs, such as biotin and streptavidin, digoxin and antidigoxin etc. For the specific binding members, the complementary member would normally be labeled with a molecule that provides for detection, in accordance with known procedures.

[0506] A variety of other reagents may be included in the screening assays described herein. Where the assay is a binding assay, these include reagents like salts, neutral proteins, e.g. albumin, detergents, etc. that are used to facilitate optimal protein-protein binding, protein-DNA binding, and/or reduce non-specific or background interactions. Reagents that improve the efficiency of the assay, such as protease inhibitors, nuclease inhibitors, anti-microbial agents, etc. may be used. The mixture of components are added in any order that provides for the requisite binding. Incubations are performed at any suitable temperature, typically between 4 and 40° C. Incubation periods are selected for optimum activity, but may also be optimized to facilitate rapid high-throughput screening. Typically between 0.1 and 1 hours will be sufficient.

[0507] Many mammalian genes have homologs in yeast and lower animals. The study of such homologs' physiological role and interactions with other proteins in vivo or in vitro can facilitate understanding of biological function. In addition to model systems based on genetic complementation, yeast has been shown to be a powerful tool for studying protein-protein interactions through the two hybrid system.

Nucleic Acid Hybridisation

[0508] “Hybridization” refers to the association of two nucleic acid sequences to one another by hydrogen bonding. Typically, one sequence will be fixed to a solid support and the other will be free in solution. Then, the two sequences will be placed in contact with one another under conditions that favor hydrogen bonding. Factors that affect this bonding include: the type and volume of solvent; reaction temperature; time of hybridization; agitation; agents to block the non-specific attachment of the liquid phase sequence to the solid support (Denhardt's reagent or BLOTTO); concentration of the sequences; use of compounds to increase the rate of association of sequences (dextran sulfate or polyethylene glycol); and the stringency of the washing conditions following hybridization. See Sambrook et al. [supra] Volume 2, chapter 9, pages 9.47 to 9.57.

[0509] “Stringency” refers to conditions in a hybridization reaction that favor association of very similar sequences over sequences that differ. For example, the combination of temperature and salt concentration should be chosen that is approximately 120 to 200° C. below the calculated Tm of the hybrid under study. The temperature and salt conditions can often be determined empirically in preliminary experiments in which samples of genomic DNA immobilized on filters are hybridized to the sequence of interest and then washed under conditions of different stringencies. See Sambrook et al. at page 9.50.

[0510] Variables to consider when performing, for example, a Southern blot are (1) the complexity of the DNA being blotted and (2) the homology between the probe and the sequences being detected. The total amount of the fragment(s) to be studied can vary a magnitude of 10, from 0.1 to 1 μg for a plasmid or phage digest to 10⁻⁹ to 10⁻⁸ g for a single copy gene in a highly complex eukaryotic genome. For lower complexity polynucleotides, substantially shorter blotting, hybridization, and exposure times, a smaller amount of starting polynucleotides, and lower specific activity of probes can be used. For example, a single-copy yeast gene can be detected with an exposure time of only 1 hour starting with 1 μg of yeast DNA, blotting for two hours, and hybridizing for 4-8 hours with a probe of 10⁸ cpm/μg. For a single-copy mammalian gene a conservative approach would start with 10 μg of DNA, blot overnight, and hybridize overnight in the presence of 10% dextran sulfate using a probe of greater than 10⁸ cpm/μg, resulting in an exposure time of ˜24 hours.

[0511] Several factors can affect the melting temperature (Tm) of a DNA-DNA hybrid between the probe and the fragment of interest, and consequently, the appropriate conditions for hybridization and washing. In many cases the probe is not 100% homologous to the fragment Other commonly encountered variables include the length and total G+C content of the hybridizing sequences and the ionic strength and formamide content of the hybridization buffer. The effects of all of these factors can be approximated by a single equation:
Tm=81+16.6(log₁₀ Ci)+0.4[%(G+C)]−0.6(% formamide)−600/n−1.5(% mismatch).
where Ci is the salt concentration (monovalent ions) and n is the length of the hybrid in base pairs (slightly modified from Meinkoth & Wahl (1984) Anal. Biochem. 138: 267-284).

[0512] In designing a hybridization experiment, some factors affecting nucleic acid hybridization can be conveniently altered. The temperature of the hybridization and washes and the salt concentration during the washes are the simplest to adjust. As the temperature of the hybridization increases (ie. stringency), it becomes less likely for hybridization to occur between strands that are nonhomologous, and as a result, background decreases. If the radiolabeled probe is not completely homologous with the immobilized fragment (as is frequently the case in gene family and interspecies hybridization experiments), the hybridization temperature must be reduced, and background will increase. The temperature of the washes affects the intensity of the hybridizing band and the degree of background in a similar manner. The stringency of the washes is also increased with decreasing salt concentrations.

[0513] In general, convenient hybridization temperatures in the presence of 50% formamide are 42° C. for a probe with is 95% to 100% homologous to the target fragment, 37° C. for 90% to 95% homology, and 32° C. 85% to 90% homology. For lower homologies, formamide content should be lowered and temperature adjusted accordingly, using the equation above. If the homology between the probe and the target fragment are not known, the simplest approach is to start with both hybridization and wash conditions which are nonstringent. If non-specific bands or high background are observed after autoradiography, the filter can be washed at high stringency and reexposed. If the time required for exposure makes this approach impractical, several hybridization and/or washing stringencies should be tested in parallel.

Nucleic Acid Probe Assays

[0514] Methods such as PCR, branched DNA probe assays, or blotting techniques utilizing nucleic acid probes according to the invention can determine the presence of cDNA or mRNA. A probe is said to “hybridize” with a sequence of the invention if it can form a duplex or double stranded complex, which is stable enough to be detected.

[0515] The nucleic acid probes will hybridize to the Streptococcus nucleotide sequences of the invention (including both sense and antisense strands). Though many different nucleotide sequences will encode the amino acid sequence, the native Streptococcal sequence is preferred because it is the actual sequence present in cells. mRNA represents a coding sequence and so a probe should be complementary to the coding sequence; single-stranded cDNA is complementary to mRNA, and so a cDNA probe should be complementary to the non-coding sequence.

[0516] The probe sequence need not be identical to the Streptococcal sequence (or its complement)—some variation in the sequence and length can lead to increased assay sensitivity if the nucleic acid probe can form a duplex with target nucleotides, which can be detected. Also, the nucleic acid probe can include additional nucleotides to stabilize the formed duplex. Additional Streptococcus sequence may also be helpful as a label to detect the formed duplex. For example, a non-complementary nucleotide sequence may be attached to the 5′ end of the probe, with the remainder of the probe sequence being complementary to a Streptococcus sequence. Alternatively, non-complementary bases or longer sequences can be interspersed into the probe, provided that the probe sequence has sufficient complementarity with the a Streptococcus sequence in order to hybridize therewith and thereby form a duplex which can be detected.

[0517] The exact length and sequence of the probe will depend on the hybridization conditions (e.g. temperature, salt condition etc.). For example, for diagnostic applications, depending on the complexity of the analyte sequence, the nucleic acid probe typically contains at least 10-20 nucleotides, preferably 15-25, and more preferably at least 30 nucleotides, although it may be shorter than this. Short primers generally require cooler temperatures to form sufficiently stable hybrid complexes with the template.

[0518] Probes may be produced by synthetic procedures, such as the triester method of Matteucci et al. [J. Am. Chem. Soc. (1981) 103:3185], or according to Urdea et al. [Proc. Natl. Acad. Sci. USA (1983) 80: 7461], or using commercially available automated oligonucleotide synthesizers.

[0519] The chemical nature of the probe can be selected according to preference. For certain applications, DNA or RNA are appropriate. For other applications, modifications may be incorporated eg. backbone modifications, such as phosphorothioates or methylphosphonates, can be used to increase in vivo half-life, alter RNA affinity, increase nuclease resistance etc. [eg. see Agrawal & Iyer (1995) Curr Opin Biotechnol 6:12-19; Agrawal (1996) TIBTECH 14:376-387]; analogues such as peptide nucleic acids may also be used [eg. see Corey (1997) TIBTECH 15:224-229; Buchardt et al. (1993) TIBTECH 11:384-386].

[0520] Alternatively, the polymerase chain reaction (PCR) is another well-known means for detecting small amounts of target nucleic acid. The assay is described in Mullis et al. [Meth. Enzymol. (1987) 155:335-350] & U.S. Pat. Nos. 4,683,195 & 4,683,202. Two “primer” nucleotides hybridize with the target nucleic acids and are used to prime the reaction. The primers can comprise sequence that does not hybridize to the sequence of the amplification target (or its complement) to aid with duplex stability or, for example, to incorporate a convenient restriction site. Typically, such sequence will flank the desired Streptococcus sequence.

[0521] A thermostable polymerase creates copies of target nucleic acids from the primers using the original target nucleic acids as a template. After a threshold amount of target nucleic acids are generated by the polymerase, they can be detected by more traditional methods, such as Southern blots. When using the Southern blot method, the labelled probe will hybridize to the Streptococcus sequence (or its complement).

[0522] Also, mRNA or cDNA can be detected by traditional blotting techniques described in Sambrook et al [supra]. mRNA, or cDNA generated from mRNA using a polymerase enzyme, can be purified and separated using gel electrophoresis. The nucleic acids on the gel are then blotted onto a solid support, such as nitrocellulose. The solid support is exposed to a labelled probe and then washed to remove any unhybridized probe. Next, the duplexes containing the labeled probe are detected. Typically, the probe is labelled with a radioactive moiety.

### REFERENCES

[0523] 1. Vaccine design:the subunit and adjuvant approach (1995) Powell & Newman. ISBN 0-306-44867-X.
[0524] 2. WO00/23105.
[0525] 3. WO90/14837.
[0526] 4. WO00/07621.
[0527] 5. Barr, et al., “ISCOMs and other saponin based adjuvants”, Advanced Drug Delivery Reviews (1998) 32:247-271. See also Sjolander, et al., “Uptake and adjuvant activity of orally delivered saponin and ISCOM vaccines”, Advanced Drug Delivery Reviews (1998) 32:321-338.
[0528] 6. Niikura et al., “Chimeric Recombinant Hepatitis E Virus-Like Particles as an Oral Vaccine Vehicle Presenting Foreign Epitopes”, Virology (2002) 293:273-280.
[0529] 7. Lenz et al., “Papillomarivurs-Like Particles Induce Acute Activation of Dendritic Cells”, Journal of Immunology (2001) 5246-5355.
[0530] 8. Pinto, et al., “Cellular Immune Responses to Human Papillomavirus (HPV)-16 L1 Healthy Volunteers Immunized with Recombinant HPV-16 L1 Virus-Like Particles”, Journal of Infectious Diseases (2003) 188:327-338.
[0531] 9. Gerber et al., “Human Papillomavrisu Virus-Like Particles Are Efficient Oral Immunogens when Coadministered with Escherichia coli Heat-Labile Entertoxin Mutant R192G or CpG”, Journal of Virology (2001) 75(10):4752-4760.
[0532] 10. Gluck et al., “New Technology Platforms in the Development of Vaccines for the Future”, Vaccine (2002) 20:B10-B16.
[0533] 11. Johnson et al. (1999) Bioorg Med Chem Lett 9:2273-2278.
[0534] 12. Meraldi et al., “OM-174, a New Adjuvant with a Potential for Human Use, Induces a Protective Response with Administered with the Synthetic C-Terminal Fragment 242-310 from the circumsporozoite protein of Plasmodium berghei”, Vaccine (2003) 21:2485-2491.
[0535] 13. Pajak, et al., “The Adjuvant OM-174 induces both the migration and maturation of murine dendritic cells in vivo”, Vaccine (2003) 21:836-842.
[0536] 14. Kandimalla, et al., “Divergent synthetic nucleotide motif recognition pattern: design and development of potent immunomodulatory oligodeoxyribonucleotide agents with distinct cytokine induction profiles”, Nucleic Acids Research (2003) 31(9): 2393-2400.
[0537] 15. Krieg, “CpG motifs: the active ingredient in bacterial extracts?”, Nature Medicine (2003) 9(7): 831-835.
[0538] 16. McCluskie, et al., “Parenteral and mucosal prime-boost immunization strategies in mice with hepatitis B surface antigen and CpG DNA”, FEMS Immunology and Medical Microbiology (2002) 32:179-185.
[0539] 17. Kandimalla, et al., “Toll-like receptor 9: modulation of recognition and cytoline induction by novel synthetic CpG DNAs”, Biochemical Society Transactions (2003) 31 (part 3): 654-658.
[0540] 18. Blackwell, et al., “CpG-A-Induced Monocyte IFN-gamma-Inducible Protein-10 Production is Regulated by Plasmacytoid Dendritic Cell Derived IFN-alpha”, J. Immunol. (2003) 170(8):4061-4068.
[0541] 19. Krieg, “From A to Z on CpG”, TRENDS in Immunology (2002) 23(2): 64-65.
[0542] 20. Kandimalla, et al., “Secondary structures in CpG oligonucleotides affect immunostimulatory activity”, BBRC (2003) 306:948-953.
[0543] 21. Kandimalla, et al., “Toll-like receptor 9: modulation of recognition and cytokine induction by novel synthetic GpG DNAs”, Biochemical Society Transactions (2003) 31(part 3):664-658.
[0544] 22. Bhagat et al., “CpG penta- and hexadeoxyribonucleotides as potent immunomodulatory agents” BBRC (2003) 300:853-861.
[0545] 23 Beignon, et al., “The LTR72 Mutant of Heat-Labile Enterotoxin of Escherichia coli Enahnces the Ability of Peptide Antigens to Elicit CD4+T Cells and Secrete Gamma Interferon after Coapplication onto Bare Skin”, Infection and Immunity (2002) 70(6):3012-3019.
[0546] 24 Pizza, et al., “Mucosal vaccines: non toxic derivatives of LT and CT as mucosal adjuvants”, Vaccine (2001) 19:2534-2541.
[0547] 25 Pizza, et al., “LTK63 and LTR72, two mucosal adjuvants ready for clinical trials” Int. J. Med. Microbiol (2000) 290(4-5):455-461.
[0548] 26 Scharton-Kersten et al., “Transcutaneous Immunization with Bacterial ADP-Ribosylating Exotoxins, Subunits and Unrelated Adjuvants”, Infection and Immunity (2000) 68(9):5306-5313.
[0549] 27 Ryan et al., “Mutants of Escherichia coli Heat-Labile Toxin Act as Effective Mucosal Adjuvants for Nasal Delivery of an Acellular Pertussis Vaccine: Differential Effects of the Nontoxic AB Complex and Enzyme Activity on Th1 and Th2 Cells” Infection and Immunity (1999) 67(12):6270-6280.
[0550] 28 Partidos et al., “Heat-labile enterotoxin of Escherichia coli and its site-directed mutant LTK63 enhance the proliferative and cytotoxic T-cell responses to intranasally co-immunized synthetic peptides”, Immunol. Lett. (1999) 67(3):209-216.
[0551] 29 Peppoloni et al., “Mutants of the Escherichia coli heat-labile enterotoxin as safe and strong adjuvants for intranasal delivery of vaccines”, Vaccines (2003) 2(2):285-293.
[0552] 30 Pine et al., (2002) “Intranasal immunization with influenza vaccine and a detoxified mutant of heat labile enterotoxin from Escherichia coli (LTK63)” J. Control Release (2002) 85(1-3):263-270.
[0553] 31. Singh et al. (2001) J. Cont. Rele. 70:267-276.
[0554] 32. WO99/27960.
[0555] 33. WO99/52549.
[0556] 34. WO01/21207.
[0557] 35. WO01/21152.
[0558] 36. Andrianov et al., “Preparation of hydrogel microspheres by coacervation of aqueous polyphophazene solutions”, Biomaterials (1998) 19(1-3):109-115.
[0559] 37. Payne et al., “Protein Release from Polyphosphazene Matrices”, Adv. Drug. Delivery Review (1998) 31(3):185-196.
[0560] 38. Stanley, “Imiquimod and the imidazoquinolones: mechanism of action and therapeutic potential” Clin Exp Dermatol (2002) 27(7):571-577.
[0561] 39. Jones, “Resiquimod 3M”, Curr Opin Investig Drugs (2003) 4(2):214-218.
[0562] 40. WO99/11241.
[0563] 41. WO98/57659.
[0564] 4242. European patent applications 0835318, 0735898 and 0761231.

1. An immunogenic composition comprising a combination of GBS polypeptides, said combination consisting of two, three, four or five polypeptides, wherein each polypeptide is encoded by a GBS polynucleotide sequence which is homologous to a polynucleotide sequence of both GAS and Streptococcus pneumoniae.

2. The immunogenic composition of claim 1, wherein said GBS polypeptides are encoded by GBS polynucleotide sequences selected from GBS Subset 1.

3. An immunogenic composition comprising a combination of GBS polypeptides, said combination consisting of two, three, four or five polypeptides, wherein each polypeptide is encoded by a GBS polynucleotide sequence which is homologous to a polynucleotide sequence of GAS.

4. The immunogenic composition of claim 3, wherein said GBS polypeptides are encoded by GBS polynucleotide sequences selected from GBS Subset 2.

5. An immunogenic composition comprising a combination of GBS polypeptides, said combination consisting of two, three, four or five polypeptides, wherein each polypeptide is encoded by a GBS polynucleotide sequence which is homologous to a polynucleotide sequence of Streptococcus pneumoniae.

6. The immunogenic composition of claim 5, wherein said GBS polypeptides are encoded by GBS polynucleotide sequences selected from GBS Subset 3.

7. An immunogenic composition comprising a combination of GBS polypeptides, said combination consisting of two, three, four or five polypeptides, wherein each polypeptide is encoded by a GBS serotype polynucleotide sequence which is homologous to at least one other GBS serotype.

8. The immunogenic composition of claim 2, wherein one or more of the GBS polypeptides are encoded by GBS serotype polynucleotide sequences which are homologous to at least one other GBS serotype.

9. An immunogenic composition comprising a fusion protein, wherein said fusion protein comprises a first polypeptide sequence which is encoded by a GBS serotype polynucleotide which is conserved across one or more GBS serotypes.

10. A polynucleotide sequence, or a fragment comprising at least 10 contiguous polynucleotides, selected from the sequences set forth on Tables 13-31 and 40-89.

11. The polynucleotide fragment of claim 10, wherein said fragment is derived from a GBS serotype polynucleotide sequence and is homologous to at least one additional GBS serotype polynucleotide sequence.

12. The immunogenic composition of claim 4, wherein one or more of the GBS polypeptides are encoded by GBS serotype polynucleotide sequences which are homologous to at least one other GBS serotype.

13. The immunogenic composition of claim 6, wherein one or more of the GBS polypeptides are encoded by GBS serotype polynucleotide sequences which are homologous to at least one other GBS serotype.

The application's sequence listing, which the Patent Office published only in electronic form, follows.

SEQUENCE LISTING (1354 sequences)

SEQ ID NO: 1 - DNA, 1005 bp, Streptococcus agalactiae
ctcctgcccctgcaatggcagttagacccataggtttatttttatattttaatgcctgcataagatgaaggatattaataattcctgagcaggcataagggtgtccgtaagctaatgtccctccaaaaatattgaatttttctctctcttcaggataataatgattaaatagagcatcaatcgctgcaaatggttcattccattcaattgcatcataatccgatattttagtatgagtttctgttaatagtttttccgtagccgtgtgaaccaattctggactaagcttgggatctcctgctacttctacaatgtgaacaatccggaattctgttttctgactctgaagcgttagaaatgcagcagcatcgtgcattaaacaaacatttccaatagtgagcaaaggtgaattttccatcaatcttggtaatttttgaaaaaatgtttcttttagttttctaacgccttgatctcgcatcccttccattggtaagattacytcttctaaatagccaccttgtttagctgttaaggcgcgtttatggctcaagaatgccaatttatctaacatttctcttctaaaaccatatttttgacagactctctgggccccttctaacattacagtttcagcataagagtcaggagaaaactgagcaactgtatattctccgttacgattatcttctttagcataacgtctcataggttgaagagaactactttcaatccccccaacaagaactttttcattaataccggtactgatttttagataaccaaaaaacaaggcagaacttgatgaagcacactgcatatcaatcgtttgtactggaatataggattcataatcagaaaaaagagtcatcaaacgaccaatattgcccccagtaccaactgtgttcccacaaataatactatcaatgttagattctgattctattttttttatttgatttaaaaggtgtgctcctaaaagttctggacggtaagtttaaattgctt

SEQ ID NO: 2 - DNA, 942 bp, Streptococcus agalactiae
tcggtataaaagggaagcaatttaaacattaccgtccagaacttttaggagcacacctcttaaatcaaataaaaaaaatagaatcagaatctaatattgatagtattatttgtgggaacacagttggtactgggggcaatattggtcgtttgatgactcttttttctgattatgaatcctatattccagtacaaacgattgatatgcagtgtgcttcatcaagttctgccttgttttttggttatctaaaaatcagtgccggtattaatgaaaaagttcttgttggggggattgaaagtagttctcttcaacctatgagacgttacgctaaagaagataatcgtaacggagaatataccgttgctcagttttctcctgactcttatgctgaaactgtaatgttagaaggggcacaaagagtctgtcaaaaatatggttttagaagagaaatgttagataaattggcattcttgagccataaacgcgccttaacagctaaacaaggtggctatttagaagaggtaatcttaccaatggaagggatgcgagatcaaggcgttagaaaactaaaagaagcattttttcaaaaattaccaagattgatggaaaattcacctttgctcactattggaaatgtttgtttaatgcacgatgctgctgcatttctaacgcttcagagtcagaaaacagaattccggattgttcacattgtagaagtagcaggagatcccaagcttagtccagaattggttcacacggctacggaaaaactattaacagaaactcatactaaaatatcggattatgatgcaattgaatggaatgaaccatttgcagcgattgatgctttatttaatcattattatcctgaagagagagaaaaattcaatatttttggaggggcattagcttacggacacccttatgcctgctcaggaatta

SEQ ID NO: 3 - DNA, 828 bp, Streptococcus agalactiae
ttgtgggaacacagttggtactgggggcaatattggtcgtttgatgactcttttttctgattatgaatcctatattccagtacaaacgattgatatgcagtgtgcttcatcaagttctgccttgttttttggttatctaaaaatcagtgccggtattaatgaaaaagttcttgttggggggattgaaagtagttctcttcaacctatgagacgttacgctaaagaagataatcgtaacggagaatataccgttgctcagttttctcctgactcttakgctgaaactgtaatgttagaaggggcacaaagagtctgtcaaaaatatggttttagaagagaaatgttagataaattggcattcttgagccataaacgcgccttaacagctaaacaaggtggctatttagaagaggtaatcttaccaatggaagggatgcgagatcaaggcgttagaaaactaaaagaagcattttttcaaaaattaccaagattgatggraaattcacctttgctcactattggaaatgtttgtttaatgcacgatgctgctgcatttctwacgcttcagagtcagaaaacagaattccggattgttcacattgtagaagtagcaggagatcccaagcttagtccagaattggttcacacggctacggaaaaactattaacagaaactcatactaaaatatcggattatgatgcaattgaatggaatgaaccatttgcagcgattgatgctttatttaatcattattatcctgaagagagagaaaaattcaatatttttggaggggcattagcttacggacacccttatgcctgctcagg

SEQ ID NO: 4 - DNA, 252 bp, Streptococcus agalactiae
atcggtataaaagggaagcaatttaaaattaccgtccagaacttttaggagcacacctcttaaatcaaataaaaaaaatagaatcagaatctaatattgatagtattatttgtgggaacacagttggtactgggggcaatattggtcgtttgatgactcttttttctgattatgaatcctatattccagtacaaacgattgatatgcagtgtgcttcatcaagttctgccttgttttttgggtatctaaaaa

SEQ ID NO: 5 - DNA, 372 bp, Streptococcus agalactiae
ttttcaaaaattaccaagattgatggaaaattcacctttgctcactattggaaatgtttgtttaatgcacgatgctgctgcatttctaacgcttcagagtcagaaaacagaattccggattgttcacattgtagaagtagcaggagatcccaagcttagtccagaattggttcacacggctacggaaaaactattaacagaaactcatactaaaatatcggattatgatgcaattgaatggaatgaaccatttgcagcgattgatgctttatttaatcattattatcctgaagagagagaaaaattcaatatttttggaggggcattagcttacggacacccttaatgcctgctcaggaattattaatatcc

SEQ ID NO: 6 - DNA, 184 bp, Streptococcus agalactiae
ggtataaaagggaagcaatttaaacattaccgtccagaacttttaggagcacacctcttaaatcaaataaaaaaaatataaccagaatctaacattgatagtattatttgtgggaacacagttggtactgggggcaatattggtcgtttgatgactcttttttctgattatgaatcctatattc

SEQ ID NO: 7 - DNA, 422 bp, Streptococcus agalactiae
caagattgatggaaaattcacctttgctcactattggaaatgtttgtttaatgcacgatgctgctgcatttctaacgcttcagagtcagaaaacagaattccggattgttcacattgtagaagtagcaggagatcccaagcttagtccagaattggttcacacggctacggaaaaactattaacagaaactcatactaaaatatcggattatgatgcaattgaatggaatgaaccatttgcagcgattgatgctttatttaatcattattatcctgaagagagagaaaaattcaatatttttggaggggcattagcttacggacacccttatgcctgctcaggaattattaatatccttcatcttatgcaggcattaaaatataaaaataaacctatgggcctaactgccattgcaggggca

SEQ ID NO: 8 - DNA, 531 bp, Streptococcus agalactiae
ccttaacagttaaacaaggtggctatttagaagaggtaatcttaccaatggaagggatgcgagatcaaggcgttagaaaactaaaagaaacattttttcaaaaattaccaagattgatggaaaattcacctttgctcactattggaaatgtttgtttaatgcacgatgctgctgcatttctaacgcttcagagtcagaaaacagaattccggattgttcacattgtagaagtagcaggagatcccaagcttagtccagaattggttcacacggctacggaaaaactattaacagaaactcatactaaaatatcggattatgatgcaattgaatggaatgaaccatttgcagcgattgatgctctatttaatcattattatcctgaagagagagaaaaattcaatatttttggagggacattagcttacggacacccttatgcctgctcaggaattattaatatccttcatcttatgcaggcattaaaatataaaaataaacctatgggtctaactgccattgcaggggcag

SEQ ID NO: 9 - DNA, 502 bp, Streptococcus agalactiae
tcggtataaaagggaagcaatttaaacattaccgtccagaacttttaggagcacaccttttaaatcaaataaaaaaaatagaatcagaatctaacattgatagtattatttgtgggaacacagttggtactgggggcaatattggtcgtttgatgactcttttttctgattatgaatcctatattccagtacaaacgattgatatgcagtgtgcttcatcaagttctgccttgttttttggttatctaaaaatcagtaccggtattaatgaaaaagttcttgttggggggattgaaagtagttctcttcaacctatgagacgttatgctaaagaagataatcgtaacggagaatatacagttgctcagttttctcctgactcttatgctgaaactgtaatgttagaaggggcccagagagtctgtcaaaaatatggttttagaagagaaatgttagataaattggcattcttgagccataaacgcgccttaacagctaaaca

SEQ ID NO: 10 - DNA, 433 bp, Streptococcus agalactiae
tttgggctacgaacacctatcggtataaaagggaagcaatttaaacattaccgtccagaacttttaggagcacaccttttaaatcaaataaaaaaaatagaatcagaatctaacattgatagtattatttgtgggaacacagttggtactgggggcaatattggtcgtttgatgactcttttttctgattatgaatcctatattccagtacaaacgattgatatgcagtgtgcttcatcaagttctgccttgttttttggttatctaaaaatcagtaccggtattaatgaaaaagttcttgttggggggattgaaagtagttctcttcaacctatgagacgttatgctaaagaagataatcgtaacggagaatatacagttgctcagttttctcctgactcttatgctgaaactgtaatgttagaaggggccc

SEQ ID NO: 11 - DNA, 414 bp, Streptococcus agalactiae
gaaaattcacctttgctcactattggaaatgtttgtttaatgcacgatgctgctgcatttctaacgcttcagagtcagaaaacagaattccggattgttcacattgtagaagtagcaggagatcccaagcttagtccagaattggttcacacggctacggaaaaactattaacagaaactcatactaaaatatcggattatgatgcaattgaatggaatgaaccatttgcagcgattgatgctctatttaatcattattatcctgaagagagagaaaaattcaatatttttggagggacattagcttacggacacccttatgcctgctcaggaattattaatatccttcatcttatgcaggcattaaaatataaaaataaacctatgggtctaactgccattgcaggggcagga

SEQ ID NO: 12 - DNA, 390 bp, Streptococcus agalactiae
cctttgctcactattggaaatgtttgtttaatgcacgatgctgctgcatttctaacgcttcagagtcagaaaacagaattccggattgttcacattgtagaagtagcaggagatcccaagcttagtccagaattggttcacacggctacggaaaaactattaacagaaactcatactaaaatatcggattatgatgcaattgaatggaatgaaccatttgcagcgattgatgctttatttaatcattattatcctgaagagagagaaaaattcaatatttttggaggggcattagcttacggacacccttatgcctgctcaggaattattaatatccttcatcttatgcaggcattaaaatataaaaataaacctatgggttctaactgc

SEQ ID NO: 13 - DNA, 390 bp, Streptococcus agalactiae
gcaatttaaacattaccgtccagaacttttaggagcacacctcttaaatcaaataaaaaaaatagaatcagaatctaatattgatagtattatttgtgggaacacagttggtactgggggcaatattggtcgtttgatgactcttttttctgattatgaatcctatattccagtacaaacgattgatatgcagtgtgcttcatcaagttctgccttgttttttggttatctaaaaatcagtgccggtattaatgaaaaagttcttgttggggggattgaaagtagttctcttcaacctatgagacgttacgctaaagaagataatcgtaacggagaatataccgttgctcagttttctcctgactcttatgctgaaactgtaatgttaga

SEQ ID NO: 14 - DNA, 401 bp, Streptococcus agalactiae
cctttgctcactattggaaatgtttgtttaatgcacgatgctgctgcatttctaacgcttcagagtcagaaaacagaattccggattgttcacattgtagaagtagcaggagatcccaagcttagtccagaattggttcacacggctacggaaaaactattaacagaaactcatactaaaatatcggattatgatgcaattgaatggaatgaaccatttgcagcgattgatgctctatttaatcattattatcctgaagagagagaaaaattcaatatttttggagggacattagcttacggacacccttatgcctgctcaggaattattaatatccttcatcttatgcaggcattaaaatataaaaataaacctatgggtctaactgccattgcaggggc

SEQ ID NO: 15 - DNA, 400 bp, Streptococcus agalactiae
gctcactattggaaatgtttgtttaatgcacgatgctgctgcatttctaacgcttcagagtcagaaaacagaattccggattgttcacattgtagaagtagcaggagatcccaagcttagtccagaattggttcacacggctacggaaaaactattaacagaaactcatactaaaatatcggattatgatgcaattgaatggaatgaaccatttgcagcgattgatgctctatttaatcattattatcctgaagagagagaaaaattcaatatttttggaggggcattagcttacggacacccttatgcctgctcaggaattattaatatccttcatcttatgcaggcattaaaatataaaaataaacctatgggtctaactgccattgcaggggcagga

SEQ ID NO: 16 - DNA, 376 bp, Streptococcus agalactiae
tttgggctacgaacacctatcggtataaaagggaagcaatttaaacattaccgtccagaacttttaggagcacaccttttaaatcaaataaaaaaaatagaatcagaatctaacattgatagtattatttgtgggaacacagttggtactgggggcaatattggtcgtttgatgactcttttttctgattatgaatcctatattccagtacaaacgattgatatgcagtgtgcttcatcaagttctgccttgttttttggttatctaaaaatcagtaccggtattaatgaaaaagttcttgttggggggattgaaagtagttctcttcaacctatgagacgttatgctaaagaagataatcgtaacggagaatata

SEQ ID NO: 17 - DNA, 859 bp, Streptococcus agalactiae
ttaaatttggtatcttgacgcttgagggagaagtacaagaaaaatgggcaattgagaccaatactttagaaaacggaagacatatcgtttctgatatcgttgaatctctcaaacatcgtttgagcctctatggattaacaaaagatgactttctcggtatcggtatgggttctccaggagctgttgatagaactagtaaaacagtaacaggtgcttttaatctaaattgggctgatactcaagaagtaggttcagttattgaaaaagaagttggaattccattttttattgataacgatgctaatgttgcagcacttggtgaacgctgggtaggtgctggtgccaataatcccgacgttgttttcgtaaccctcggaacaggagtaggtggaggtgttatcgcagatggtaacctcatccatggtgttgcaggagcaggtggagaaattgggcatatgattgttgatccagaaaatggatttacgtgcacatgtggtaacaaaggctgccttgagacagttgcatcagcgacaggtgttgttagagtagcacgtcaactcgcagaacaatatgagggttcgtctgccattaaagcagcgattgacaccggtgatactgttacaagtaaagatatttttatagcagcagaagatggggataaatttgctaattctgttgttgaacgtgtatcacgttaccttggactggcagcagctaatatttcaaatattttaaaccctgattctgtggttattggtggcggtgtctcagcagcaggtgaatttttacgtagtcgcgttgagaaatactttgtcacatttgctttcccacaagttaaaaagtcaactaaaattaagat

SEQ ID NO: 18 - DNA, 737 bp, Streptococcus agalactiae
cgtttctgatatcgttgaatctctcaaacatcgtttgagcctctatggattaacaaaagatgactttctcggtatcggtatgggttctccaggagctgttgatagaactagtaaaacagtaacaggtgcttttaatctaaattgggctgatactcaagaagtaggttcggttattgaaaaagaagttggaattccattttttattgataacgatgctaatgttgcagcacttggtgaacgctgggtaggtgctggtgccaataatcccgatgttgttttcgtaaccctcggaacaggagtaggtggaggtgttatcgcagatggtaacctcatccatggtgttgcaggagcaggtggagaaattgggcatatgattgttgatccagakaatggatttacgtgcacatgtggtaacaaaggctgtcttgagacagttgcatcagcgacaggtgttgttagagtagcacgtcaactcgcagaacaatatgaaggttcgtctgccattaaagcagcgattgacaacggtgatactgttacaagtaaagatatttttatagcagcagaagatggggataaatttgctaattctgttgttgaacgtgtatcacgttaccttggactggcagcagctaatatttcaaatattttaaaccctgattctgtggttattggtggcggtgtctcagcagcaggtgaatttttacgtagtcgcgttgagaaatactttgtcacatttg

SEQ ID NO: 19 - DNA, 210 bp, Streptococcus agalactiae
acaagaaaaatgggcaattgagaccaatactttagaaaacggaagacatatcgtttctgatatcgttgaatctctcaaacatcgtttgagcctctatggattaacaaaagatgactttctcggtatcggtatgggttctccaggagctgttgatagaactagtaaaacagtaacaggtgcttttaatctaaattgggctgatactcaaga

SEQ ID NO: 20 - DNA, 195 bp, Streptococcus agalactiae
ttggtatcttgacgcttgaggagaagtacaagaaaaatgggcaattgagaccaatactttagaaaacggaagacatatcgtttctgatatcgttgaatctctcaaacatcgtttgagcctctatggattaacaaaagatgactttctcggtatcggtatggggtctccaggagctgttgatagaactagtaaaac

SEQ ID NO: 21 - DNA, 141 bp, Streptococcus agalactiae
caccagctaatatttcaaatattttaaaccctgattctgtggttattggtggcggtgtctcagcagcaggtgaatttttacgtagtcgcgttgagaaatactttgtcacatttgctttcccacaagttaaaaagtcaacta

SEQ ID NO: 22 - DNA, 138 bp, Streptococcus agalactiae
gggcaattgagaccaatactttagaaaacggaagacatatcgtttctgatatcgttgaatctctcaaacatcgtttgagcctctatggattaacaaaagatgactttctcggtatcggtatgggttctccaggagctg

SEQ ID NO: 23 - DNA, 325 bp, Streptococcus agalactiae
ggcaattgagaccaatactttagaaaacggaagacatatcgtttctgatatcgttgaatctctcaaacatcgtttgagcctctatggattaacaaaagatgactttctcggtatcggtatgggttctccaggagctgttgatagaactagtaaaacagtaacaggtgcttttaatctaaattgggctgatactcaagaagtaggttcagttattgaaaaagaagttggaattccattttttattgataacgatgctaatgttgcagcacttggtgaacgctgggtaggtgctggtgccaataatcccgacgttgttttcgtaacc

SEQ ID NO: 24 - DNA, 320 bp, Streptococcus agalactiae
gagacagttgcatcagcgacaggtgttgttagagtagcacgtcaactcgcagaacaatatgagggttcgtctgccattaaagcagcgattgacaacggtgatactgttacaagtaaagatatttttatagcagcagaagatggggataaatttgctaattctgttgttgaacgtgtatcacgttaccttggactggcagcagctaatatttcaaatattttaaaccctgattctgtggttattggtggcggtgtctcagcagcaggtgaatttttacgtagtcgcgttgagaaatactttgtcacatttgctttcccaca

SEQ ID NO: 25 - DNA, 425 bp, Streptococcus agalactiae
acaagaaaaatgggcaattgagaccatacttagaaaacggaagacatatcgtttctgatatcgttgaatctctcaaacatcgtttgagcctctatggattaacaaaagatgactttctcggtatcggtatgggttctccaggagctgttgatagaactagtaaaacagtaacaggtgcttttaatctaaattgggctgatactcaagaagtaggttcggttattgaaaaagaagttggaattccattttttattgataacgatgctaatgttgcagcacttggtgaacgctgggtaggtgctggtgccaataatcccgatgttgttttcgtaaccctcggaacaggagtaggtggaggtgttatcgcagatggtaacctcatccatggtgttgcaagagcaggtggagaaattgggcatatgatt

SEQ ID NO: 26 - DNA, 110 bp, Streptococcus agalactiae
cagcagcaggtgaatttttacgtagtcgcgttgagaaatactttgtcacatttgctttcccacaagttaaaaagtcaactaaaattaagattgctgaactaggtaatgat

SEQ ID NO: 27 - DNA, 355 bp, Streptococcus agalactiae
agaagtacaagaaaatgggcaattgagaccatacttagaaaacggaagacatatcgtttctgatatcgttgaatctctcaaacatcgtttgagcctctatggattaacaaaagatgactttctcggtatcggtatgggttctccaggagctgttgatagaactagtaaaacagtaacaggtgcttttaatctaaattgggctgatactcaagaagtaggttcggttattgaaaaagaagttggaattccattttttattgataacgatgctaatgttgcagcacttggtgaacgctgggtaggtgctggtgccaataatcccgatgttgttttcgtaaccctcggaacaggagta

SEQ ID NO: 28 - DNA, 230 bp, Streptococcus agalactiae
gatactgttacaagtaaagatatttttatagcagcagaagatggggataaatttgctaattctgttgttgaacgtgtatcacgttaccttggactggcagcagctaatatttcaaatattttaaaccctgattctgtggttattggtggcggtgtctcagcagcaggtgaatttttacgtagtcgcgttgagaaatactttgtcacatttgctttcccacaagttaaaaa

SEQ ID NO: 29 - DNA, 389 bp, Streptococcus agalactiae
aaatttggtatcttgacgcttgagggagaagtacaagaaaaatgggcattgagaccatacttagaaaacggaagacatatcgtttctgatatcgttgaatctctcaaacatcgtttgagcctctatggattaacaaaagatgactttctcggtatcggtatgggttctccaggagctgttgatagaactagtaaaacagtaacaggtgcttttaatctaaattgggctgatactcaagaagtaggttcagttattgaaaaagaagttggaattccattttttattgataacgatgctaatgttgcagcacttggtgaacgctgggtaggtgctggtgccaataatcccgacgttgttttcgtaaccctcggaacaggagtaggtggagg

SEQ ID NO: 30 - DNA, 252 bp, Streptococcus agalactiae
gtgatactgttacaagtaaagatatttttatagcagcagaagatggggataaatttgctaattctgttgttgaacgtgtatcacgttaccttggactggcagcagctaatatttcaaatattttaaaccctgattctgtggttattggtggcggtgtctcagcagcaggtgaatttttacgtagtcgcgttgagaaatactttatcacatttgctttcccacaagttaaaaagtcaactaaaattaagattg

SEQ ID NO: 31 - DNA, 455 bp, Streptococcus agalactiae
gttatcgcagatggtaacctcatccatggtgttgcaggagcaggtggagaaattgggcatatgattgttgatccagaaaatggatttacgtgcacatgtggtaacaaaggctgccttgagacagttgcatcagcgacaggtgttgttagagtagcacgtcaactcgcagaacaatatgagggttcgtctgccattaaagcagcgattgaccacggtgatactgttacaagtaaagatatttttatagcagcagaagatggggataaatttgctaattctgttgttgaacgtgtatcacgttaccttggactggcagcagctaatatttcaaatattttaaaccctgattctgtggttattggtggcggtgtctcagcagcaggtgaatttttacgtagtcgcgttgagaaatactttgtcacatttgctttcccacaagttaaaaagtcaactaa

SEQ ID NO: 32 - DNA, 282 bp, Streptococcus agalactiae
tggtatcttgacgcttgagggagaagtacaagaaaaatgggcaattgagaccatacttagaaaacggaagacatatcgtttctgatatcgttgaatctctcaaacatcgtttgagcctctatggattaacaaaagatgactttctcggtatcggtatgggttctccaggagctgttgatagaactagtaaaacagtcacaggtgcttttaatctaaattgggctgatactcaagaagtaggttcagttattgaaaaagaagctggaattccattttttattg

SEQ ID NO: 33 - DNA, 127 bp, Streptococcus agalactiae
agcagctaatatttcaaatattttaaaccctgattctgtggttattggtggcggtgtctcagcagcaggtgaatttttacgtagtcgcgttgagaaatactttgtcacatttgttttcccacaaggt

SEQ ID NO: 34 - DNA, 610 bp, Streptococcus agalactiae
tgacttggatattcatcaaggagaagtggtggttattattggcccttctggctctggtaagtcaacatttttaagaacaatgaatctcttggaagtaccaacaaagggaacagtgacttttgaaggaattgatataacagacaaaaaaaatgatatttttaaaatgcgcgaaaaaatgggcatggtttttcaacagttcaatctatttcccaatatgactgtactagaaaatattactttatcacctattaagacaaagggactttctaagcttgatgctcagacaaaagcatacgagctacttgaaaaagttggactcaaagagaaggctaatgcttatccagctagcttatctggaggacaacaacaacggattgctattgcaagaggtcttgcaatgaatcctgatgtccttctttttgatgaacctacttcagctcttgatcctgaaatggtaggtgaagtcttgactgttatgcaagatttagctaaatctggtatgacgatggttattgtcactcatgaaatgggttttgcacgtgaagtagcggatcgtgtcatttttatggatgcaggcattattgtgagcaagggacccctaaggaagtat

SEQ ID NO: 35 - DNA, 610 bp, Streptococcus agalactiae
ttgggaaaaatgaggttttaaaaggcattgacttggatattcatcaaggagaagtagtggttattattggcccttctggctctggtaagtcaacatttttaagaacaatgaatctcttggaagtaccaacaaagggaacagtgacttttgaagggattgatataacagacaaaaagaatgatatttttaaaatgcgcgaaaaaatgggcatggtttttcaacagttcaatctatttcccaatatgactgtactagaaaatattactttatcacctattaagacaaaggggctttctaatcttgatgctcagacaaaagcatatgagctacttgaaaaagttggactcaaagagaaggctaatacttatccagctagcttatctggaggacaacaacaacgaattgctattgcaagaggtcttgcaatgaatcctcatgtccttctttttgatgaacctacttcagctcttgatcctgaaatggtaggtgaagtcttgactgttatgcaagatttagctaaatctggtatgacgatggttattgtcactcatgaaatgggttttgcacgtgaagtagcggatcgtgtcatttttatggacgcagaaattat

SEQ ID NO: 36 - DNA, 622 bp, Streptococcus agalactiae
aaaaatgaggttttaaaaggcattgacttggatattcatcaaggagaagtagtggttattattggcccttctggctctggtaagtcaacatttttaagaacaatgaatctcttggaagtaccaacaaagggaacagtgacttttgaagggattgatataacagacaaaaagaatgatatttttaaaatgcgcgaaaaaatgggcatggtttttcaacagttcaatctatttcccaatatgactgtactagaaaatattactttatcacctattaagacaaaggggctttctaatcttgatgctcagacaaaagcatatgagctacttgaaaaagttggactcaaagagaaggctaatacttatccagctagcttatctggaggacaacaacaacgaattgctattgcaagaggtcttgcaatgaatcctgatgtccttctttttgatgaacctacttcagctcttgatcctgaaatggtaggtgaagtcttgactgttatgcaagatttagctaaatctggtatgacgatggttattgtcactcatgaaatgggttttgcacgtgaagtagcggatcgtgtcatttttatggatgcaggaattattgttgagcaaggggccc

SEQ ID NO: 37 - DNA, 628 bp, Streptococcus agalactiae
gaggttttaaaaggcattgacttggatattcatcaaggagaagtggtggttattattggcccttctggctctggtaagtcaacatttttaagaacaatgaatctcttggaagtaccaacaaagggaacagtgacttttgaagggattgatataacagacaaaaagaatgatatttttaaaatgcgcgaaaaaatgggcatggtttttcaacagttcaatctatttcccaatatgactgtactagaaaatattactttatcacctattaagacaaagggactttctaagcttgatgctcagacaaaagcatacgagctacttgaaaaagttggactcaaagagaaggctaatgcttatccagcaagcttatctggaggacaacaacaacggattgctattgcaagaggtcttgcaatgaatcctgatgtccttctttttgatgaacctacttcagctcttgatcctgaaatggtaggtgaagtcttgactgttatgcaagatttagctaaatctggtatgacgatggttattgtcactcatgaaatgggttttgcacgtgaagtagcggatcgtgtcatttttatggatgcagggattattgttgagcaagggacccctaagaaagtat

SEQ ID NO: 38 - DNA, 584 bp, Streptococcus agalactiae
tggtggttattattggcccttctggctctggtaagtcaacatttttaagaacaatgaatctcttggaagtaccaacaaagggaacagtgacttttgaagggattgatataacagacaaaaagaatgatatttttaaaatgcgcgaaaaaatgggcatggtttttcaacagttcaatctatttcccaatatgactgtactagaaaatattactttatcacctattaagacaaagggactttctaagcttgatgctcagacaaaagcatacgagctacttgaaaaagttggactcaaagagaaggctaatgcttatccagctagcttatctggagggcaacaacaacgaattgctattgcaagaggtcttgcaatgaatcctgatgtccttctttttgatgaacctacttcagctcttgatcctgaaatggtaggtgaagtcttgactgttatgcaagatttagctaaatctggtatgacgatggttattgtcactcatgaaatgggttttgcacgtgaagtagcggatcgtgtcatttttatggatgcaggcattattgttgascaagggacccctaaggaagta

SEQ ID NO: 39 - DNA, 699 bp, Streptococcus agalactiae
caatacaaggacttcataaaagttttgggaaaaatgaggttttaaaaggcattgacttggatattcatcaaggagaagtagtggttattattggcccttctggctctggtaagtcaacatttttaagaacaatgaatctcttggaagtaccaacaaagggaacagtgacttttgaagggattgatataacagacaaaaagaatgatatttttaaaatgcgcgaaaaaatgggcatggtttttcaacagttcaatctatttcccaatatgactgtactagaaaatattactttatcacctattaagacaaaggggctttctaagcttgatgctcagacaaaagcatatgagctacttgaaaaagttggactcaaagagaaggctaatacttatccagctagcttatctggaggacaacaacaacgaattgctattgcaagaggtcttgcaatgaatcctgatgtccttctttttgatgaacctacttcagctcttgatcctgaaatggtaggtgaagtcttgactgttatgcaagatttagctaaatctggtatgacgatggttattgtcactcatgaaatgggttttgcacgtgaagtagcggatcgtgtcatttttatggatgcaggaattattgtgagcaaggggcccctaaggaagtatttgagcagacaaaagaaatccgcacaagagatttctt

SEQ ID NO: 40 - DNA, 595 bp, Streptococcus agalactiae
gacttggatattcatcaaggagaagtggtggttattattggcccttctggctctggtaagtcaacatttttaagaacaatgaatctcttggaagtaccaacaaagggaacagtgacttttgaagggattgatataacagacaaaaagaatgatatttttaaaatgcgcgaaaaaatgggcatggtttttcaacagttcaatctatttcccaatatgactgtactagaaaatattactttatcacctattaagacaaagggactttctaagcttgatgctcagacaaaagcatacgagctacttgaaaaagttggactcaaagagaaggctaatgcttatccagctagcttatctggaggacaacaacaacgaattgctattgcaagaggtcttgcaatgaatcctgatgtccttctttttgatgaacctacttcagctcttgatcctgaaatggtaggtgaagtcttgactgttatgcaagatttagctaaatctggtatgacgatggttattgtcactcatgaaatgggttttgcacgtgaagtagcggatcgtgtctttttatggatgcgggaattattgtgagcaagggacc

SEQ ID NO: 41 - DNA, 630 bp, Streptococcus agalactiae
atgaggttttaaaaggcattgacttggatattcatcaaggagaagtagtggttattattggcccttctggctctggtaagtcaacatttttaagaacaatgaatctcttggaagtaccaacaaagggaacagtgacttttgaagggattgatataacagacaaaaagaatgatatttttaaaatgcgcgaaaaaatgggcatggtttttcaacagttcaatctatttcccaatatgactgtactagaaaatattactttatcacctattaagacaaaggggctttctaagcttgatgctcagacaaaagcatatgagctacttgaaaaagttggactcaaagagaaggctaatacttatccagctagcttatctggaggacaacaacaacgaattgctattgcaagaggtcttgcaatgaatcctgatgtccttctttttgatgaacctacttcagctcttgatcctgaaatggtaggtgaagtcttgactgttatgcaagatttagctaaatctggtatgacgatggttattgtcactcatgaaatgggttttgcacgtgaagtagcggatcgtgtcatttttatggatgcasgaattattgttgagcaaggggcccctaaggaagtat

SEQ ID NO: 42 - DNA, 645 bp, Streptococcus agalactiae
ggttttaaaaggcattgacttggatattcatcaaggagaagtagtggttattattggcccttctggctctggtaagtcaacatttttaagaacaatgaatctcttggaagtaccaacaaagggaacagtgacttttgaagggattgatataacagacaaaaagaatgatatttttaaaatgcgcgaaaaaatgggcatggtttttcaacagttcaatctatttcccaatatgactgtactagaaaatattactttatcacctattaagacaaaggggctttctaagcttgatgctcagacaaaagcatatgagctacttgaaaaagttggactcaaagagaaggctaatacttatccagctagcttatctggaggacaacaacaacgaattgctattgcaagaggtcttgcaatgaatcctgatgtccttctttttgatgaacctacttcagctcttgatcctgaaatggtaggtgaagtcttgactgttatgcaagatttagctaaatctggtatgacgatggttattgtcactcatgaaatgggttttgcacgtgaagtagcggatcgtgtcatttttatggatgcaggaattattgttgagcaaggggcccctaaggaagtatttagcaaaacaaaagaaat

SEQ ID NO: 43 - DNA, 330 bp, Streptococcus agalactiae
ggtggttattattggcccttctggctctggtaagtcaacatttttaagaacaatgaatctcttggaagtaccaacaaagggaacagtgacttttgaagggattgatataacagacaaaaagaatgatatttttaaaatgcgcgaaaaaatgggcatggtttttcaacagttcaatctatttcccaatatgactgtactagaaaatattactttatcacctattaagacaaagggactttctaagcttgatgctcagacaaaagcatacgagctacttgaaaaagttggactcaaagagaaggctaatgcttatccagcaagcttatctgg

SEQ ID NO: 44 - DNA, 359 bp, Streptococcus agalactiae
attgacttggatattcatcaaggagaagtggtggttattattggcccttctggctctggtaagtcaacatttttaagaacaatgaatctcttggaagtaccaacaaagggaacagtgacttttgaagggattgatataacagacaaaaagaatgatatttttaaaatgcgcgaaaaaatgggcatggtttttcaacagttcaatctatttcccaatatgactgtactagaaaatattactttatcacctattaagacaaagggactttctaagcttgatgctcagacaaaagcatacgagctacttgaaaaagttggactcaaagagaaggctaatgcttatccagcaagcttatctgg

SEQ ID NO: 45 - DNA, 957 bp, Streptococcus agalactiae
tggtcgctctgtcggaacgtgaagtatctgtactgtctgcagaaagcgtcatgcgtgctattaattatgataaattttttgttaaaacttattttatcacgcaagtaggtcaatttattaaaacacaagaatttgatgaaatgccatcttcagatgaaaagttaatgacaaaccaaactgttgatttagacaaaatggttcgtccaagtgatatctatgatgataatgcaattgttttccccgttttacatggaccaatgggggaagatggttctatccaaggatttttagaagttttaaggatgccttatgttgggactaatattctatcttcaagcgtggctatggataaaattacaacaaaacaagtccttgcaacagtaggtgtacctcaggttgcatatcaaacttattttgagggtgatgatttggaacatgcgattaaactctctttagaaactttaagtttcccaatttttgtaaaaccggctaatatggggtcatcagtaggtatttcaaaagcgacagatgaatcctcacttcgctctgcaattgacttagctctcaagtatgatagccgtattttgattgaacaaggcgtgacagctcgtgaaattgaagtaggtattttaggcaataatgatgttaagacaacttttcctggcgaagttgttaaagacgtcgatttctatgactatgacgccaaatatattgataataaaattactatggatattccagctaaagttgatgaagcaactatggaagcaatgcgtcaatatgcaagtaaagcttttaaagcaatcggggcttgtggtttatcacgctgtgatttctttttgacgaaagatggacaaatcttcttaaacgaactgaatacaatgcccggttttactcagtggtcaatgtatcctctgctttgggaaaatatggggctaacttatagtgatttgattg

SEQ ID NO: 46 - DNA, 795 bp, Streptococcus agalactiae
aaaccgggcattgtattcagttcgtttaagaagacttgtccatctttcgtcaaaaagaaatcacagcgtgataaaccacaagccccgattgctttaaaagctttacttgcatattgacgcattgcttccatagttgcttcatcaactttagctggaatatccatagtaattttattatcaatatatttggcgtcatagtcatagaaatcgacgtctttaacgacttcgccaggaaaagttgtcttaacatcattattgcctaaaatacctacttcaatttcacgagctgtcacgccttgttcaatcaaaatacggctatcatacttgagagctaagtcaatkscagagcgaagtgaggattcatctgtcgcttttgaaatacctactgatgaccccatattagccggttttacaaaaattgggaaacttaaagtttctaaagagagtttaatcgcatgttccaaatcatcaccctcaaaataagtttgatatgcaacctgaggtacacctactgttgcaaggacttgttttgttgtaattttatccatagccacgcttgaagatagaatattagtcccaacataaggcatccttaaaacttctaaaaatccttggatagaaccatcttcccccattggtccatgtaaaacggggaaaacaattgcattatcatcatagatatcacttggacgaaccattttgtctaaatcaacagtttggtttgtcattaacttttcatctgaagatggcatttcatcaaattcttgtgttttaataaattgacctacttgcgtg

SEQ ID NO: 47 - DNA, 342 bp, Streptococcus agalactiae
tcgctctgcggaacgtgaagtatctgtactgtctgcagaaagcgtcatgcgtgctattaattatgataaattttttgttaaaacttattttatcacgcaagtaggtcaatttattaaaacacaagaatttgatgaaatgccatcttcagatgaaaagttaatgacaaaccaaactgttgatttagacaaaatggttcgtccaagtgatatctatgatgataatgcaattgttttccccgttttacatggaccaatgggggaagatggttctatccaaggatttttagaagttttaaggatgccttatgttgggactaatattctatcttcaagcgtggctat

SEQ ID NO: 48 - DNA, 208 bp, Streptococcus agalactiae
cgtcgatttctatgactatgacgccaaatatattgataataaaattactatggatattccagctaaagttgatgaagcaactatggaagcaatgcgtcaatatgcaagtaaagcttttaaagcaatcggggcttgtggtttatcacgctgtgatttctttttgacgaaagatggacaaatcttcttaaacgaactgaatacaatgccc

SEQ ID NO: 49 - DNA, 147 bp, Streptococcus agalactiae
aacgtgaagtatctgtactgctctgcagaaaagcgtcatgcgtgctattaattatgataaattttttgttaaaacttattttatcacgcaagtaggtcaatttattaaaacacaagaatttgatgaaatgccatcttcagatgaaaa

SEQ ID NO: 50 - DNA, 440 bp, Streptococcus agalactiae
ctaatatggggtcatcagtaggtatttcaaaagcgacagatgaatcctcacttcgctctgcaattgacttagctctcaagtatgatagccgtattttgattgaacaaggcgtgacagctcgtgaaattgaagtaggtattttaggcaataatgatgttaagacaacttttcctggcgaagtcgttaaagacgtcgatttctatgactatgacgccaaatatattgataataaaattactatggatattccagctaaagttgatgaagcaactatggaagcaatgcgtcaatatgcaagtaaagcttttaaagcaatcggggcttgtggtttatcacgctgtgatttctttttgacgaaagatggacaaatcttcttaaacgaactgaatacaatgcccggttttactcagtggtcaatgtatcctctgctttgggaaaat

SEQ ID NO: 51 - DNA, 392 bp, Streptococcus agalactiae
ttgacttagctctcaagtatgatagccgtattttgattgaacaaggcgtgacagctcgtgaaattgaagtaggtattttaggcaataatgatgttaagacaacttttcctggcgaagtcgttaaagacgtcgatttctatgactatgacgccaaatatattgataataaaattactatggatattccagctaaagttgatgaagcaactatggaagcaatgcgtcaatatgcaagtaaagcttttaaagcaatcggggcttgtggtttatcacgctgtgatttctttttgacgaaagatggacaaatcttcttaaacgaactgaatacaatgcccggttttactcagtggtcaatgtatcccctgctttgggaaaagtatggggctaacctt

SEQ ID NO: 52 - DNA, 312 bp, Streptococcus agalactiae
atctgtactgtctgcagaaaagcgtcatgcgtgctattaattatgataaattttttgttaaaacttattttatcacgcaagtaggtcaatttattaaaacacaagaatttgatgaaatgccatcttcagatgaaaagttaatgacaaaccaaactgttgatttagacaaaatggttcgtccaagtgatatctatgatgataatgcaattgttttccccgttttacatggaccaatgggggaagatggttctatccaaggatttttagaagttttaaggatgccttatgttgggactaatattctatcttcaa

SEQ ID NO: 53 - DNA, 542 bp, Streptococcus agalactiae
ggctatggataaaattacaacaaaacaagtccttgcaacagtaggtgtacctcaggttgcatatcaaacttattttgagggtgatgatttggaacatgcgattaaactctctttagaaactttaagtttcccaatttttgtaaaaccggctaatatggggtcatcagtaggtatttcaaaagcgacagatgaatcctcacttcgctctgcaattgacttagctctcaagtatgatagccgtattttgattgaacaaggcgtgacagctcgtgaaattgaagtaggtattttaggcaataatgatgttaagacaacttttcctggcgaagtcgttaaagacgtcgatttctatgactatgacgccaaatatattgataataaaattactatggatattccagctaaagttgatgaagcaactatggaagcaatgcgtcaatatgcaagtaaagcttttaaagcaatcggggcttgtggtttatcacgctgtgatttctttttgacgaaagaatggacaaatcttcttaaacgaactgaaatac

SEQ ID NO: 54 - DNA, 201 bp, Streptococcus agalactiae
tctgtactgtctgcagaaagcgtcatgcgtgctattaattatgataaattttttgttaaaacttattttatcacgcaagtaggtcaatttattaaaacacaagaatttgatgaaatgccatcttcagatgaaaagttaatgacaaaccaaactgttgatttagacaaaatggttcgtccaagtgatatctatgatgataat

SEQ ID NO: 55 - DNA, 465 bp, Streptococcus agalactiae
aaaaccggctaatatggggtcatcagtaggtatttcaaaagcgacagatgaatcctcacttcgctctgcaattgacttagctctcaagtatgatagccgtattttgattgaacaaggcgtgacagctcgtgaaattgaagtaggtattttaggcaataatgatgttaagacaacttttcctggcgaagtcgttaaagacgtcgatttctatgactatgacgccaaatatattgataataaaattactatggatattccagctaaagttgatgaagcaactatggaagcaatgcgtcaatatgcaagtaaagcttttaaagcaatcggggcttgtggtttatcacgctgtgatttctttttgacgaaagatggacaaatcttcttaaacgaactgaatacaatgcccggttttactcagtggtcaatgtatcccctgctttgggaaaatatggggctaacttatag

SEQ ID NO: 56 - DNA, 367 bp, Streptococcus agalactiae
cgtgaagtatctgtactgtctgcagaaagcgtcatgcgtgctattaattatgataaattttttgttaaaacttattttatcacgcaagtaggtcaatttattaaaacacaagaatttgatgaaatgccatcttcagatgaaaagttaatgacaaaccaaactgttgatttagacaaaatggttcgtccaagtgatatctatgatgataatgcaattgttttccccgttttacatggaccaatgggggaagatggttctatccaaggatttttagaagttttaaggatgccttatgttgggactaatattctatcttcaagcgtggctatggataaaattacaacaaaacaagtccttgcaacagtag

SEQ ID NO: 57 - DNA, 507 bp, Streptococcus agalactiae
atgcgattaaactctctttagaacctttaagtttcccaatttttgtaaacccggctaatatggggtcatcagtaggtatttcaaaagcgacagatgaatcctcacttcgctctgcaattgacttagctctcaagtatgatagccgtattttgattgaacaaggcgtgacagctcgtgaaattgaagtaggtattttaggcaataatgatgttaagacaacttttcctggcgaagttgttaaagacgtcgatttctatgactatgacgccaaatatattgataataaaattactatggatattccagctaaagttgatgaagcaactatggaagcaatgcgtcaatatgcaagtaaagcttttaaagcaatcggggcttgtggtttatcacgctgtgatttctttttgacgaaagatggacaaatcttcttaaacgaactgaatacaatgcccggttttactcagtggtcaatgtatcctctgctttgggaaaatatggggctaactt

SEQ ID NO: 58 - DNA, 350 bp, Streptococcus agalactiae
gtcatgccgtgctattaattatgataaattttttgttaaaacttattttatcacgcaagtaggtcaatttattaaaacacaagaatttgatgaaatgccatcttcagatgaaaagttaatgacaaaccaaactgttgatttagacaaaatggttcgtccaagtgatatctatgatgataatgcaattgttttccccgttttacatggaccaatgggggaagatggttctatccaaggatttttagaagttttaaggatgccttatgttgggactaatattctatcttcaagcgtggctatggataaaattacaacaaaacaagtccttgcaacagtaggtgtacctcagg

SEQ ID NO: 59 - DNA, 537 bp, Streptococcus agalactiae
ttttgagggtgatgatttggaacatgcgattaaactctctttagaaactttaagtttcccaatttttgtaaaaccggctaatatggggtcatcagtaggtatttcaaaagcgacagatgaatcctcacttcgctctgcaattgacttagctctcaagtatgatagccgtattttgattgaacaaggcgtgacagctcgtgaaattgaagtaggtattttaggcaataatgatgttaagacaacttttcctggcgaagtcgttaaagacgtcgatttctatgactatgacgccaaatatattgataataaaattactatggatattccagctaaagttgatgaagcaactatggaagcaatgcgtcaatatgcaagtaaagcttttaaagcaatcggggcttgtggtttatcacgctgtgatttctttttgacgaaagatggacaaatcttcttaaacgaactgaatacaatgcccggttttactcagtggtcaatgtatcccctgctttgggaaaatatggggctaacttatagtga

SEQ ID NO: 60 - DNA, 384 bp, Streptococcus agalactiae
tggtcgctctgcggaacgtgaagtatctgtactgtctgcagaaagcgtcatgcgtgctattaattatgataaattttttgttaaaacttattttatcacgcaagtaggtcaatttattaaaacacaagaatttgatgaaatgccatcttcagatgaaaagttaatgacaaaccaaactgttgatttagacaaaatggttcgtccaagtgatatctatgatgataatgcaattgttttccccgttttacatggaccaatgggggaagatggttctatccaaggatttttagaagttttaaggatgccttatgttgggactaatattctatcttcaagcgtggctatggataaaattacaacaaaacaagtccttgcaacagtagg

SEQ ID NO: 61 - DNA, 220 bp, Streptococcus agalactiae
aagcaggggatacattgaccactgagtaaaaccgggcattgtattcagttcgtttaagaagatctgtccatctttcgtcaaaaagaaatcacagcgtgataaaccacaagccccgattgctttaaaagctttacttgcatattgacgcattgcttccatagatgcttcatcaactttagctggaatatccatagcaattttattatcaatatatttggcg

SEQ ID NO: 62 - DNA, 459 bp, Streptococcus agalactiae
tttaaaggttgattcctttttgactcatcaggtagattttgagttaatgcaggaaataggtaaagtttttgctgataaatataaagaagccggcattacgaaggttgttacgattgaagcatctggaattgcgccagcagtgtacgcagctcaagcattgggcgtaccaatgatatttgctaaaaaggctaagaacattactatgactgaaggtatcttaactgctgaagtgtattcttttacaaagcaagwtacgagtcaagtttctattgtgagtcgctttttatctaacgatgatactgtactcatcattgatgactttttagcaaacggtcaagcggctaaaggattacttgaaattattggtcaagctggagctaaggttgctggtatcggaatcgttattgaaaaatctttccaagatgggcgtgatttgttagaaaaaacaggtgttccagt

SEQ ID NO: 63 - DNA, 463 bp, Streptococcus agalactiae
tttaggtgagaacattttaaaggttgattcttttttgactcatcaggtagattttgagttaatgcaggaaataggtaaagtttttgctgataaatataaagaagccggcattacgaaggttgttacgattgaagcatctggaattgcaccagcagtgtacgcagctcaagcattgggcgkaccaatgatatttgctaaaaaagctaagaacattactatgactgaaggtatcttaactgctgaagtgtattcttttacaaagcaagttacgagtcaagtttctattgtgagtcgctttttatctaacgatgatactgtactcatcattgatgactttttagcaaacggtcaagcggctaaaggattacttgaaattattggtcaagctggagctaaggttgctggtatcggaatcgttattgaaaaatctttccaagatgggcgtgatttgttagaaaaaaca

SEQ ID NO: 64 - DNA, 477 bp, Streptococcus agalactiae
aagaacgtattcttaaagatggtgatgttttaggtgagaacattttaaaagttgattcttttttgactcatcaggtagattttgagttaatgcaggaaataggtaaagtttttgctgataaatataaagaagccggcattacgaaggttgttacaattgaagcatctggaattgcgccagcagtgtacgcagctcaagcattgggcgtaccaatgatatttgctaaaaaagctaagaacattactatgactgaaggtatcttaactgctgaagtgtattcttttacaaagcaagttacgagtcaagtttctattgtgagtcgctttttatctaacgatgatactgtactcatcattgatgactttttagcaaacggtcaagcggctaaaggattacttgaaattattggtcaagctggagctaaggttgctggtatcggaatcyttattgaaaaatctttccaagatgggcgtgatt

SEQ ID NO: 65 - DNA, 463 bp, Streptococcus agalactiae
attcttttttgactatcaggtaaattttgagttaatgcaggaaataggtaaagtttttgctgataaatataaagaagccggcattacgaaggttgttacaattgaagcatctggaattgcgccagcagtgtacgcagctcaagcattgggcgtaccaatgatatttgctaaaaaagctaagaacattactatgactgaaggtatcttaactgctgaagtgtattcttttacaaagcaagttacgagtcaagtttctattgtgagtcgctttttatctaacgatgatactgtactcatcattgatgactttttagcaaacggtcaagcggctaaaggattacttgaaattattggtcaagctgaagctaaggttgctggtatcggaatcgttattgaaaaatctttccaagatgggcgtgatttgttagaaaaaacaggtgttccggttacttctcttgctcgt

SEQ ID NO: 66 - DNA, 380 bp, Streptococcus agalactiae
gaacgtattcttaaagatggtgatgttttaggtgagaacattttaaaagttgattcttttttgactcatcaggtaaattttgagttaatgcaggaaataggtaaagtttttgctgataaatataaagaagccggcattacgaaggttgttacaattgaagcatctggaattgcgccagcagtgtacgcagctcaagcattgggcgtaccaatgatatttgctaaaaaagctaagaacattactatgactgaaggtatrttaactgctgaagtgtattcttttacaaagcaagttacgagtcaagtttctattgtgagtcgctttttatctaacgatgatactgtactcatcattgatgactttttaacaaacggtcaagc

SEQ ID NO: 67 - DNA, 448 bp, Streptococcus agalactiae
acattttaaaggttgattcttttttgactcatcaggtagattttgagttaatgcaggaaataggtaaagtttttgctgataaatataaagaagccggcattacgaaggttgttacgattgaagcatctggaattgcaccagcagtgtacgcagctcaagcattgggcgtaccaatgatatttgctaaaaaagctaagaacattactatgactgaaggtatcttaactgctgaagtgtattcttttacaaagcaagttacgagtcaagtttctattgtgagtcgctttttatctaacgatgatactgtactcatcattgatgactttttagcaaacmgtcyagcggctaaaggattacttgaaattattggtcaagctggagctaaggttgctggtatcggaatcgttattgaaaaatctttccaagatgggcgtgatttgttagaaaa

SEQ ID NO: 68 - DNA, 419 bp, Streptococcus agalactiae
acgtattcttaaagatggtgatgttttaggtgagaacattttaaaagttgattcttttttgactcatcaggtagattttgagttaatgcaggaaataggtaaagtttttgctgataaatataaagaagccggcattacgaaggttgttacaattgaagcatctggaattgcgccagcagtgtacgcagctcaagcattgggcgtaccaatgatatttgctaaaaaagctaagaacattactatgactgaaggtatcttaactgctgaagtgtattcttttacaaagcaagttacgagtcaagtttctattgtgagtcgctttttatctaacgatgatactgtactcatcattgatgactttttagcaaacggkcaagcggstaaaggattacttgaaattattggtcaagctggagcta

SEQ ID NO: 69 - DNA, 462 bp, Streptococcus agalactiae
tttaaaagttgattcttttttgactcatcaggtaaattttgagttaatgcaggaaataggtaaagtttttgctgataaatataaagaagccggcattacgaaggttgttacaattgaagcatctggaattgcgccagcagtgtacgcagctcaagcattgggcgtaccaatgatatttgctaaaaaagctaagaacattactatgactgaaggtatcttaactgctgaagtgtattcttttacaaagcaagttacgagtcaagtttctattgtgagtcgctttttatctaacgatgatactgtactcatcattgatgactttttagcaaacggtcaagcggctaaaggattacttgaaattattggtcaagctgaagctaaggttgctggtatcggaatcgttattgaaaaatctttccaagatgggcgtgatttgttagaaaaaacaggtgttccggttac

SEQ ID NO: 70 - DNA, 390 bp, Streptococcus agalactiae
gctgataaatataaagaagccggcattacgaaggttgttacaattgaagcatctggaattgcgccagcagtgtacgcagctcaagcattgggcgtaccaatgatatttgctaaaaaagctaagaacattactatgactgaaggtatcttaactgctgaagtgtattcttttacaaagcaagttacgagtcaagtttctattgtgagtcgctttttatctaacgatgatactgtactcatcattgatgactttttagcaaacggtcaagcggctaaaggattacttgaaatttattggtcaagctggagctaaggttgctggtatcggaatcgttattgaaaaatctttccaagatgggcgtgatttgttagaaaaaacaggtgttccagt

SEQ ID NO: 71 - DNA, 498 bp, Streptococcus agalactiae
aacgtattcttaaagatggtgatgttttaggtgagaacattttaaaagttgattcttttttgactcatcaggtagattttgagttaatgcaggaaataggtaaagtttttgctgataaatataaagaagccggcattacgaaggttgttacaattgaagcatctggaattgcgccagcagtgtacgcagctcaagcattgggcgtaccaatgatatttgctaaaaaagctaagaacattactatgactgaaggtatcttaactgctgaagtgtattcttttacaaagcaagttacgagtcaagtttctattgtgagtcgctttttatctaacgatgatactgtactcatcattgatgactttttagcaaacggtcaagcggctaaaggattacttgaaattattggtcaagctggagctaaggttgctggtatcggaatcgttattgaaaaatctttccaagatgggcgtgatttgttagaaaaaacaggtgttccag

SEQ ID NO: 72 - DNA, 300 bp, Streptococcus agalactiae
acgaaggttgttacaattgaagcatctggaattgcgccagcagtgtacgcagctcaagcattgggcgtaccaatgatatttgctaaaaaagctaagaacattactatgactgaaggtatcttaactgctgaagtgtattcttttacaaagcaagttacgagtcaagtttctattgtgagtcgctttttatctaacgatgatactgtactcatcattgatgactttttagcaaacggtcaagcggctaaaggattacttgaaattattggtcaagctggagctaaggttgctggtatcgga

SEQ ID NO: 73 - DNA, 635 bp, Streptococcus agalactiae
aatcttcattggagatcaggctagagctccgtatggtcctagacctgctcaacagattagagagtttacctggcagatggttaatttcttattgactaaaaatgttaagatgattgttatagcttgtaatacagcaactgcagttgcctggcaagaaattaaagaaaaactagacgtgcctgttttaggcgttattttaccaggagctagcgcagctatcaaatcaactaattcagggaaagttggtattataggtactcccatgactgttaaatcagatgcttatcgtcaaaaaattcaagctttgtctccaaatactgctgtggtatcccttgcttgtccgaaatttgttccaattgtggaatcaaatcagatgtcttctagtttagccaaaaaggtggtttatgaaacgttgtccccattagttggtaaattagatactttaattttaggttgcacgcattatcccttattacgtcccatcattcaaaatgttatgggggctgaggttaaattaattgatagtggcgcagaaaccgttcgtgatatttctgttttattgaactattttgagataaaccataattggcaaaataaacacggtggtcatcacttttacacaaccgccagcccaa

SEQ ID NO: 74 - DNA, 681 bp, Streptococcus agalactiae
aaatgttccgtcaacttccagaagaggaagtaatcttcattggagatcaggctagagctccgtatggtcctagacctgctcaacagattagagagtttacctggcagatggttaacttcttattgactaaaaatgttaagatgattgttatagcttgtaatacagcaactgcagttgcctggcaagaaattaaagaaaaactagacatccctgttttaggcgttattttaccaggagctagcgcagctatcaaatcaactaatttagggaaagttggtattataggtactcccatgactgttaaatcagatgcttatcgtcaaaaaattcaagctttgtctccaaatactgctgtggtatcccttgcttgtccgaaatttgttccaattgtggaatcaaatcagatgtcttctagtttagccaaaaaggtggtttatgaaacgttgtccccattagttggtaaattagatactttaattttaggttgcacgcattatcccctattacgtcccatcattcaaaatgttatgggggctgaggttaaattaattgatagtggcgcagaaaccgttcgtgatatttctgttttattgaactattttgagataaaccataattggcaaaataaacacggtggtcatcacttttacacaaccgccagcccaaaaggttttaaagaaa

SEQ ID NO: 75 - DNA, 682 bp, Streptococcus agalactiae
aatcttcattggagaccaggctagagctccgtatggtcctagacctgctcaacagattagagagttacctggcagatggttaatttcttattgactaaaaatgttaagatgattgttatagcttgtaatacagcaactgcagttgcctggcaagaaattaaagaaaaactagacatacctgttttaggcgttattttaccaggagctagcgcagctatcaaatcaactaattcagggaaagttggtattataggtactcccatgactgttaaatcagatgcttatcgtcaaaaaattcaagctttgtctccaaatactgctgtggtatcccttgcttgtccgaaatttgttccaattgtggaatcaaatcagatgtcttctagtttagccaaaaaggtggtttatgaaacgctgtccccattagttggtaaattagatactttaattttaggttgcacgcattatcccttattacgtcccatcattcaaaatgttatgggggctgaggttaaattaattgatagtggcgcagaaaccgttcgtgatatttctgttttattgaactattttgagataamccataattggsmaaataaacacggtggtcatcacttttacacaaccgscagcccaaaaggtttttaaggaaattgcagaacaatggcttaatcaagaaataaat

SEQ ID NO: 76 - DNA, 681 bp, Streptococcus agalactiae
gcggttgtgtaaaagtgatgaccaccgtgtttattttgccaattatggtttatctcaaaatagttcaataaaacagaaatatcacgaacggtttctgcgccactatcaattaatttaacctcagcccccataacattttgaatgatgggacgtaataggggataatgcgtgcaacctaaaattaaagtatctaatttaccaactaatggggacaacgtttcataaaccacctttttggctaaactagaagacatctgatttgattccacaattggaacaaatttcggacaagcaagggataccacagcagtatttggagacaaagcttgaattttttgacgataagcatctgatttaacagtcatgggagtacctataataccaactttccctaaattagttgatttgatagctgcgctagctcctggtaaaataacgcctaaaacagggatgtctagtttttctttaatttcttgccaggcaactgcagttgctgtattacaagctataacaatcatcttaacatttttagtcaataagaagttaaccatctgccaggtaaactctctaatctgttgagcaggtctaggaccatacggagctctagcctgatctccaatgaagattacttcctcttctggaagttgacggaacatttccttaacaaccgttaaaccacct

SEQ ID NO: 77 - DNA, 373 bp, Streptococcus agalactiae
ttccgtcaacttccaaaatatgaagtaatcttcattggagatcaggctagagctccgtatggtcctagacctgctcaacagattagagagtttacctggcagatggttaacttcttattgactaaaaatgttaagatgattgttatagcttgtaatacagcaactgcagttgcctggcaagaaattaaagaaaaactagacatccctgttttaggcgttattttaccaggagctagcgcagctatcaaatcaactaatttagggaaagttggtattataggtactcccatgactgttaaatcagatgcttatcgtcaaaaaattcaagctttgtctccaaatactgctgtggtatcccttgcttgtccgaaat

SEQ ID NO: 78 - DNA, 181 bp, Streptococcus agalactiae
gtaatcttcattggagatcaggctagagctccgtatggtcctagacctgctcaacagattagagagtttacctggcagatggttaatttcttattgactaaaaatgttaagatgattgttatagcttgtaatacagcaactgcagttgcctggcaagaaattaaagaaaaactagacatac

SEQ ID NO: 79 - DNA, 390 bp, Streptococcus agalactiae
cttttgggctggcggttgtgtaaaattgatgaccaccgtgtttattttgccaattatggtttatctcaaaatagttcaataaaacagaaatatcacgaacggtttctgcgccactatcaattaatttaacctcagcccccataacattttgaataatgggacgtaataggggataatgcgtgcaacctaaaattaaagtatctaatttaccaactaatggggacaatgtttcataaaccacctttttggctaaactagaagacatctgatttgattccacaattggaacaaatttcggacaagcaagggataccacagcagtatttggagacaaagcttgaattttttgacgataagcatctgatttaacagtcatgggagtacctataa

SEQ ID NO: 80 - DNA, 147 bp, Streptococcus agalactiae
gtaatcttcattggggatcaggctagagctccgtatggtcctagacctgctcaacagattagagagtttacctggcagatggttaatttcttattgactaaaaatgttaagatgattgttatagcttgtaatacagcaactgcagtt

SEQ ID NO: 81 - DNA, 335 bp, Streptococcus agalactiae
gaaatgttccgtcaacttccagaagaggaagtaatcttcattggagatcaggctagagctccgtatggtcctagacctgctcaacagattagagagtttacctggcagatggttaacttcttattgactaaaaatgttaagatgattgttatagcttgtaatacagcaactgcagttgcctggcaagaaattaaagaaaaactagacatccctgttttaggcgttattttaccaggagctagcgcagctatcaaatcaactaatttagggaaagttggtattataggtactcccatgactgttaaatcagatgcttatcgtcaaaaaattcaagc

SEQ ID NO: 82 - DNA, 213 bp, Streptococcus agalactiae
atttctttaaaaccttttgggctggcggttgtgtaatattgatgaccaccgtgtttattttgccaattatggtttatctcaaaatagttcaataaaacagaaatatcacgaacggtttctgcgccactatcaattaatttaacctcagcccccataacattttgaatgatgggacgtaatatgggataatgcgtgcaacctaaaattaaagta

SEQ ID NO: 83 - DNA, 305 bp, Streptococcus agalactiae
atttctttaaaaccttttgggctggcggttgtgtaataagtgatgaccaccgtgtttattttgccaattatggtttatctcaaaatagttcaataaaacagaaatatcacgaacggtttctgcgccactatcaattaatttaacctcagcccccataacattttgaatgatgggacgtaataggggataatgcgtgcaacctaaaattaaagtatctaatttaccaactaatggggacaacgtttcataaaccacctttttggctaaactagaagacatctgatttgattccacaattggaacaa

SEQ ID NO: 84 - DNA, 252 bp, Streptococcus agalactiae
ggcggttgtgtaaaagtgatgaccaccgtgtttattttgccaattatggtttatctcaaaatagttcaataaaacagaaatatcacgaacggtttctgcgccactatcaattaatttaacctcagcccccataacattttgaatgatgggacgtaataggggataatgcgtgcaacctaaaattaaagtatctaatttaccaactaatggggacaacgtttcataaaccacctttttggctaaactagaaga

SEQ ID NO: 85 - DNA, 141 bp, Streptococcus agalactiae
aatcttcattggagatcaggctagagctccgtatggtcctagacctgctcaacagattagagagtttacctggcagatggttaacttcttattgactaaaaatgttaagatgattgttatagcttgtaatacagcaactgc

SEQ ID NO: 86 - DNA, 403 bp, Streptococcus agalactiae
tgggctggcggttgtgtaaaagtgatgaccaccgtgtttattttgccaattatggtttatctcaaaatagttcaataaaacagaaatatcacgaacggtttctgcgccactatcaattaatttaacctcagcccccataacattttgaatgatgggacgtaataagggataatgcgtgcaacctaaaattaaagtatctaatttaccaactaatggggacaacgtttcataaaccacctttttggctaaactagaagacatctgatttgattccacaattggaacaaatttcggacaagcaagggataccacagcagtatttggagacaaagcttgaattttttgacgataagcatctgatttaacagtcatgggagtacctataataccaactttccctgaa

SEQ ID NO: 87 - DNA, 737 bp, Streptococcus agalactiae
atccctagaccattataagcatgtttcactccattttgtctaacaaatcgtaacaatgctgtttctttaggcttgtaaaccaagtcgacaactactaaattcggtgttaaaatttctggatcgttaattaaactataattatctaatggcctcattcctaaactagtagcatcaatataaaaatgactagttctaatagcgtctttaaatgctgtcttattttctagataatcaacgactacctttatttgaaactgttttttaattttatctgataagtcaatgaccttatcgtaatttgagctgttacgattaaataatctaatttccgcaactccctccatagctgcttgaactgcaactgctttacctgaaccaccaataccagctattgtaattattttatttttagcactgaaaccttgagctgctaaagctttaaaacaaccaatgccatctgtcatatggcctactaaacgtccggttccaccttgattaacgatagtatttacagcacccactaatttagcttgaggagataaatcatctagcaaagggataacactctgtttaaatggcattgaaacattaacaccacgaatacccaatgccctgacacctcgaacagcttctgttaatttaccctcttctacttcaaatgtcagataggcataattcatgtttttttcttgaaaagaggtattccacattaacggggatagagagtggcgtgcagg

SEQ ID NO: 88 - DNA, 777 bp, Streptococcus agalactiae
gttattaattgaaatgcttctgctccttgataaatcagcatccctagaccattataagcatgtttcactccattttgtctaacaaatcgtaacaatgctgtttctttaggcttgtaaaccaagtcgacaactactaaattcggtgttaaaatttctggatcgttaattaaactataattatctaatggcctcattcctaaactagtagcatcaatataaaaatgactagttctaatagcgtctttaaatgctgtcttattttctagataatcaacgactacctttatttgaaactgttttttaattttatctgataagtcaatgaccttatcgtaatttgagctgttacgattaaataatctaatttccgcaactccctccatagctgcttgaactgcaactgctttacctgaaccaccaataccagctattgtaattattttatttttagcactgaaaccttgagctgctaaagctttaaaacaaccaatgccatctgtcatatggcctactaaacgtccggttccaccttgattaacgatagtatttacagcacccactaatttagcttgaggagataaatcatctagcaaagggataacactctgtttaaatggcattgaaacattaacaccacgaatacccaatgccctgacacctcgaacagcttctgttaatttaccctcttctacttcaaatgtcagataggcataattcatgtttttttcttgaaaagaggtattccacattaacggggatagagagtggcgtgcagga

SEQ ID NO: 89 - DNA, 673 bp, Streptococcus agalactiae
ctggtctaattgccaatcctgcacgccactctctatccccgttaatgtggaatacctcttttcaagaaaaaaacatgaattatgcctatctgacatttgaagtagaagagggtaaattaacagaagctgttcgaggtgtcagggcattgagtattcgtggtgttaatgtttcaatgccatttaaacagagtgttatccctttgctagatgatttatctcctcaagctaaattagtgggtgctgtaaatactatcgttaatcaaggtggaaccggacgtttagtaggccatatgacagatggcattggttgttttaaagctttagcagctcaaggtttcagtgctaaaaataaaataattacaatagctggtattggtggttcaggtaaagcagttgcagttcaagcagctatggagggagttgcggaaattagattatttaatcgtaacagctcaaattacgataaggtcattgacttatcagataaaattaaaaaacagtttcaaataaaggtagtcgttgattatctagaaaataagacagcatttaaagacgctattagaactagtcatttttatattgatgctactagtttaggaatgaggccattagataattatagtttaattaacgatccagatattttaacaccgaatttagtagttgtcgactt

SEQ ID NO: 90 - DNA, 742 bp, Streptococcus agalactiae
aaatcagcatccctagacattataagcatgtttcactccattttgtctaacaaatcgtaacaatgctgtttctttaggcttgtaaaccaagtcgacaactactaaattcggtgttaaaatttctggatcgttaattaaactataattatctaatggcctcattcctaaactagtagcatcaatataaaaatgactagttctaatagcgtctttaaatgctgtcttattttctagataatcaacgactacctttatttgaaactgttttttaattttatctgataagtcaatgaccttatcgtaatttgagctgttacgattaaataatctaatttccgcaactccctccatagctgcttgaactgcaactgctttacctgaaccaccaataccagctattgtaattattttatttttagcactgaaaccttgagctgctaaagctttaaaacaaccaatgccatctgtcatatggcctactaaacgtccggttccaccttgattaacgatagtatttacagcacccactaatttagcttgaggagataaatcatctagcaaagggataacactctgtttaaatggcattgaaacattaacaccacgaatactcaatgccctgacacctcgaacagcttctgttaatttaccctcttctacttcaaatgtcagataggcataattcatgtttttttcttgaaaagaggtattccacattaacggggatagagagtggcgtgca

SEQ ID NO: 91 - DNA, 647 bp, Streptococcus agalactiae
gttcgaggtgtcagggcattgggtattcgtggtgttaatgtttcaatgccatttaaacagagtgttatccctttgctaratgatttatctcctcaagctaaattagtgggtgctgtaaatactatcgttaatcaaggtggaaccgsacgtttagtaggccatatgacagatggcattggttgttttaaagctttagcagctcaaggtttcagtgctaaaaataaaatagttacaatagctggtattggtggttcaggtaaagcagttgcagttcaagcagctatggagggagttgcggaaattagattatttaatcgtaatagctcaaattacgataaggtcattgacttatcagataaaattaaaaaacagtttcaaataaaggtagtcgttgattatctagaaaataagacagcatttaaagacgctattagaactagtcatttttatattgatgctactagtttaggaatgargccattagataattatagtttaattaacgatccagaaattttaacacccaatttagtagttgtcgacttggtttacaagcctaaagaaacagcattgttacgatttgttagacaaaatggagtgaaacatgcttataatggtctagggatgctgatttatcaaggagcaga

SEQ ID NO: 92 - DNA, 720 bp, Streptococcus agalactiae
ccctagaccattataatcatgtttcactccattttgtctaacaaatcgtaacaatgctgtttctttaggcttgtaaaccaagtcgacaactactaaattcggtgttaaaatttctggatcgttaattaaactataattatctaatggcctcattcctaaactagtagcatcaatataaaaatgactagttctaatagcgtctttaaatgctgtcttattttctagataatcaacgactacctttatttgaaactgttttttaattttatctgataagtcaatgaccttatcgtaatttgagctgttacgattaaataatctaatttccgcaactccctccatagctgcttgaactgcaactgctttacctgaaccaccaataccagctattgtaattattttatttttagcactgaaaccttgagctgctaaagctttaaaacaaccaatgccatctgtcatatggcctactaaacgtccggttccaccttgattaacgatagtatttacagcacccactaatttagcttgaggagataaatcatctagcaaagggataacactctgtttaaatggcattgaaacattaacaccacgaatacccaatgccctgacacctcgaacagcttctgttaatttaccctcttctacttcaaatgtcagataggcataattcatgtttttttcttgaaaagaggtattccacattaacggggatag

SEQ ID NO: 93 - DNA, 231 bp, Streptococcus agalactiae
tgcacgccactctctatccccgttaatgtggaatacctcttttaagaaaaaaacatgaattatgcctatctgacatttgaagtagaagagggtaaattaacagaagctgttcgaggtgtcagggcattgagtattcgtggtgttaatgtttcaatgccatttaaacagagtgttatccctttgctagatgatttatctcctcaagctaaattagtgggtgctgtaaatact

SEQ ID NO: 94 - DNA, 447 bp, Streptococcus agalactiae
attcgttattaattgaaatgcttctgctccttgataaatcagcatccctagaccattataagcatgtttcactccattttgtctaacaaatcgtaacaatgctgtttctttaggcttgtaaaccaagtcgacaactactaaattgggtgttaaaatttctggatcgttaattaaactataattatctaatggcctcattcctaaactagtagcatcaatataaaaatgactagttctaatagcgtctttaaatgctgtcttattttctagataatcaacgactacctttatttgaaactgttttttaattttatctgataagtcaatgaccttatcgtaatttgagctattacgattaaataatctaatttccgcaactccctccataactgcttgaactgcaactgctttacctgaaccaccaataccagctattgtaactatttt

SEQ ID NO: 95 - DNA, 351 bp, Streptococcus agalactiae
actctctatccccgttaatgtggaatacctcttttcaagaaaaaaacatgaattatgcctatctgacatttgaagtagaagagggtaaattaacagaagctgttcgaggtgtcagggcattgggtattcgtggtgttaatgtttcaatgccatttaaacagagtgttatccctttgctagatgatttatctcctcaagctaaattagtgggtgctgtaaatactatcgttaatcaaggtggaaccggacgtttagtaggccatatgacagatggcattggttgttttaaagctttagcagctcaaggtttcagtgctaaaaataaaatagttacaatagctggtattggtg

SEQ ID NO: 96 - DNA, 356 bp, Streptococcus agalactiae
attcgttattaattgaaatgcttctgctccttgataaatcagcatccctagaccattataagcatgtttcactccattttgtctaacaaatcgtaacaatgctgtttctttaggcttgtaaaccaagtcgacaactactaaattcggtgttaaaatttctggatcgttaattaaactataattatctaatggcctcattcctaaactagtagcatcaatataaaaatgactagttctaatagcgtctttaaatgctgtcttattttctagataatcaacgactacctttatttgaaactgttttttaattttatctgataagtcaatgaccttatcgtaatttgagctgttacgat

SEQ ID NO: 97 - DNA, 247 bp, Streptococcus agalactiae
acttctctattccccgttaatgtggaatacctcttttcaagaaaaaaacatgaattatgcctatctgacatttgaagtagaagagggtaaattaacagaagctgttcgaggtgtcagggcattgggtattcgtggtgttaatgtttcaatgccatttaaacagagtgttatccctttgctagatgatttatctcctcaagctaaattagtgggtgctgtaaatactatcgttaatcaaggtggaacc

SEQ ID NO: 98 - DNA, 376 bp, Streptococcus agalactiae
tcgttattaattgaaatgcttctgctccttgataaatcatcatccctagaccattataagcatgtttcactccattttgtctaacaaatcgtaacaatgctgtttctttaggcttgtaaaccaagtcgacaactactaaattcggtgttaaaatttctggatcgttaattaaactataattatctaatggcctcattcctaaactagtagcatcaatataaaaatgactagttctaatagcgtctttaaatgctgtcttattttctagataatcaacgactacctttatttgaaactgttttttaattttatctgataagtcaatgaccttatcgtaatttgagctgttacgattaaataatctaatttccgcaac

SEQ ID NO: 99 - DNA, 345 bp, Streptococcus agalactiae
atgcctatctgacatttgaagtagaagagggtaaattaacagaagctgttcgaggtgtcagggcattgggtattcgtggtgttaatgtttcaatgccatttaaacagagtgttatccctttgctagatgatttatctcctcaagctaaattagtgggtgctgtaaatactatcgttaatcaaggtggaaccggacgtttagtaggccatatgacagatggcattggttgttttaaagctttagcagctcaaggtttcagtgctaaaaataaaataattacaatagctggtattggtggttcaggtaaagcagttgcagttcaagcagctatggagggagttgcgg

SEQ ID NO: 100 - DNA, 463 bp, Streptococcus agalactiae
ccctagaccattataagtcatgtttcactccattttgtctaacaaatcgtaacaatgctgtttctttaggcttgtaaaccaagtcgacaactactaaattgggtgttaaaatttctggatcgttaattaaactataattatctaatggcctcattcctaaactagtagcatcaatataaaaatgactagttctaatagcgtctttaaatgctgtcttattttctagataatcaacgactacctttatttgaaactgttttttaattttatctgataagtcaatgaccttatcgtaatttgagctattacgattaaataatctaatttccgcaactccctccatagctgcttgaactgcaactgctttacctgaaccaccaataccagctattgtaactattttatttttagcactgaaaccttgagctgctaaagctttaaaacaaccaatgccatctgtcat

SEQ ID NO: 101 - DNA, 363 bp, Streptococcus agalactiae
atcgattcgatattgtagtggctaacgaagaagaaggcggccaaaagaaaaaaattgttaaacgtgtcattggtatgccaggtgatgtcatcaaatataaaaatgacaccttaactattaacaataaaaaaacagaagaaccttacctcaaggaatatactaaattatttaaaaaggataaattacaggaaaaatattcgtataacccacttttccaagacctagcacaaagctctaccgctttcaccactgacagcaatggcagcagcgaatttactactgtcgtgcctaaaggccactactatcttgttggtgatgaccgaattgtctctaaagatagtcgtgccgtcggttccttcaaaa

SEQ ID NO: 102 - DNA, 458 bp, Streptococcus agalactiae
taaagttgacggacactccatggatccaactttagctgacaaggaacagctagtagttctcaaacaaacaaaaatcaatcgattcgatattgtagtggctaacgaagaagaaggcggccaaaagaaaaaaattgttaaacgtgtcattggtatgccaggtgatgtcatcaaatataaaaatgacaccttaactattaacaataaaaaaacagaagaaccttacctcaaggaatatactaaattatttaaaaaggataaattacaggaaaaatattcgtataacccacttttccaagacctagcacaaagctctaccgctttcactactgacagcaatggcagcagcgaatttactactgtcgtgcctaaaggccactattatcttgttggtgatgaccgaattgtctctaaagatagtcgtgccgtcggtcccttcaaaaaatcaacaattgtgggag

SEQ ID NO: 103 - DNA, 457 bp, Streptococcus agalactiae
ttgacggacactccatggatccaactttagctgacaaggaacagctagtagttctcaaacaaacaaaaatcaatcgattcgatattgtagtggctaacgaagaagaaggcggccaaaagaaaaaaattgttaaacgtgtcattggtatgccaggtgatgtcatcaaatataaaaatgacaccttaactattaacaataaaaaaacagaagaaccttacctcaaggaatatactaaattatttaaaaaggataaattacaggaaaaatattcgtataacccacttttccaagacctagcacaaagctctaccgctttcaccactgacagcaatggcagcagcgaatttactactgtcgtgcctaaaggccactactatcttgttggtgatgaccgaattgtctctaaagatagtcgtgccgtcggtcccttcaaaaaatcaacgattgtgggagaggt

SEQ ID NO: 104 - DNA, 428 bp, Streptococcus agalactiae
aagttgacggacactccatggatccaactttagctgacaaggaacagctagtagttctcaaacaaacaaaaatcaatcgattcgatattgtagtggctaacgaagaagaaggcggccaaaagaaaaaaattgttaaacgtgtcattggtatgccaggtgatgtcatcaaatataaaaatgacaccttaactattaacaataaaaaaacagaagaaccttacctcaaggaatatactaaattatttaaaaaggataaattacaggaaaaatattcgtataacccacttttccaagacctagcacaaagctctaccgctttcaccactgacagcaatggcagcagcgaatttactactgtcgtgcctaaaggccactactatcttgttggtgatgaccgaattgtctctaaagatagtcgtgccgtcggt

SEQ ID NO: 105 - DNA, 393 bp, Streptococcus agalactiae
ttgacggacactccatggatccaactttagctgacaaggaacagctagtagttctcaaacaaacaaaataatcgattcgatattgtagtggctaacgaagaagaaggcggccaaaagaaaaaaattgttaaacgtgtcattggtatgccaggtgatgtcatcaaatataaaaatgacaccttaactattaacaataaaaaaacagaagaaccttacctcaaggaatatactaaattatttaaaaaggataaattacaggaaaaatattcgtataacccacttttccaagacctagcacaaagctctaccgctttcaccactgacagcaatggcagcagcgaatttactactgtcgtgcctaaaggccactactatcttgttggtgatgaccga

SEQ ID NO: 106 - DNA, 351 bp, Streptococcus agalactiae
ttgacggacactccatggatccaactttagctgacaaggaacagctagtagttctcaaacaaacaaaaatcaatcgattcgatattgtagtggctaacgaagaagaaggcggccaaaagaaaaaaattgttaaacgtgtcattggtatgccaggtgatgtcatcaaatataaaaatgacaccttaactattaacaataaaaaaacagaagaaccttacctcaaggaatatactaaattattttaaaaaggataaattacaggaaaaatattcgtataacccacttttccaagacctagcacaaagctctaccgctttcaccactgacagcaatggcagcagcgaatttact

SEQ ID NO: 107 - DNA, 452 bp, Streptococcus agalactiae
ttggtaaagttgacggacactccatggatccaactttagctgacaaggaacagctagtagttctcaaacaaacaaaaatcaatcgattcgatattgtagtggctaacgaagaagaaggcggccaaaagaaaaaaattgttaaacgtgtcattggtatgccaggtgatgtcatcaaatataaaaatgacaccttaactattaacaataaaaaaacagaagaaccttacctcaaggaatatactaaattatttaaaaaggataaattacaggaaaaatattcgtataacccacttttccaagacctagcacaaagctctaccgctttcactactgacagcaatggcagcagcgaatttaccactgtcgtgcctaaaggccactactatcttgttggtgatgaccgaattgtctctaaagatagtcgtgccgtcggccccttcaaaaaatcaacg

SEQ ID NO: 108 - DNA, 395 bp, Streptococcus agalactiae
ttgacggacactccatggatccaactttagctgacaaggaacagctagtagttctcaaacaaacaaaaatcaatcgattcgatattgtagtggctaacgaagaagaaggcggccaaaagaaaaaaattgttaaacgtgtcattggtatgccaggtgatgtcatcaaatataaaaatgacaccttaactattaacaataaaaaaacagaagaaccttacctcaaggaatatactaaattatttaaaaaggataaattacaggaaaaatattcgtataacccacttttccaagacctagcacaaagctctaccgctttcaccactgacagcaatggcagcagcgaatttactactgtcgtgcctaaaggccactactatcttgttggtgatgaccga

SEQ ID NO: 109 - DNA, 430 bp, Streptococcus agalactiae
taaagttgacggacactccatggatccaactttagctgacaaggaacagctagtagttctcaaacaaacaaaaatcaatcgattcgatattgtagtggctaacgaagaagaaggcggccaaaagaaaaaaattgttaaacgtgtcattggtatgccaggtgatgtcatcaaatataaaaatgacaccttaactattaacaataaaaaaacagaagaaccttacctcaaggaatatactaaattatttaaaaaggataaattacaggaaaaatattcgtataacccacttttccaagacctagcacaaagctctaccgctttcactactgacagcaatggcagcagcgaatttactactgtcgtgcctaaaggccactattatcttgttggtgatgaccgaattgtctctaaagatagtcgtgccgtcggt

SEQ ID NO: 110 - DNA, 447 bp, Streptococcus agalactiae
aaagttgacggacactccatggatccaactttagctgacaaggaacagctagtagttctcaaacaaacaaaaatcaatcgattcgatattgtagtggctaacgaagaagaaggcggccaaaagaaaaaaattgttaaacgtgtcattggtatgccaggtgatgtcatcaaatataaaaatgacaccttaactattaacaataaaaaaacagaagaaccttacctcaaggaatatactaaattatttaaaaaggataaattacaggaaaaatattcgtataacccacttttccaagacctagcacaaagctctaccgctttcaccactgacagcaatggcagcagcgaatttactactgtcgtgcctaaaggccactactatcttgttggtgatgaccgaattgtctctaaagatagtcgtgccgtcggtcccttcaaaaaatcaacg

SEQ ID NO: 111 - DNA, 621 bp, Streptococcus agalactiae
aatcttttaattatgggtttgcctggtgctggtaaaggtactcaagcagctaagatcgttgaagaatttggtgttgctcacatctcaacaggggatatgttccgcgccgcaatggctaatcaaaccgaaatgggacgtttagctaaaagttatattgataaaggtgaattggttcctgatgaagtaacaaacgggattgtaaaagagcgcttagctgaggatgatatcgcagaaaaaggttttttacttgatggatatccacgtactattgaacaagcacacgccttagatgctacgcttgaagaactaggactacgcttagatggtgttattaatattaaagtggatccatcatgtcttatagagcgtttgagtggtcgtattatcaatcgtaaaactggtgaaactttccacaaagtgttcaacccaccagtagattataaagaagaagattactatcaacgtgaagatgataagcctgaaactgtcaaacgtcgcttggacgttaatattgctcaaggagaacctattcttgaacactatcgtaagcttggtcttgttacagatattgaaggtaatcaagaaataacagaagtttttgcagatgttgaaaaagcgttg

SEQ ID NO: 112 - DNA, 633 bp, Streptococcus agalactiae
aatcttttaattatgggtttgcctggtgctggtaaaggtactcaagcagctaagatcgttgaagaatttggtgttgctcacatctcaacaggggatatgttccgcgccgcaatggctaatcaaaccgaaatgggacgtttagctaaaagttatattgataaaggtgaattggttcctgatgaagtaacaaacgggattgtaaaagagcgcttagctgaggatgatatcgcagaaaaaggttttttacttgatggatatccacgtactattgaacaagcacacgccttagatgctacgcttgaagaactaggactacgcttagatggtgttattaatattaaagtggatccatcatgtcttatagagcgtttgagtggtcgtattatcaatcgtaaaactggtgaaactttccacaaagtgttcaacccaccagtagattataaagaagaagattactatcaacgtgaagatgataagcctgaaactgtcaaacgtcgcttggacgttaatattgctcaaggagaacctattcttgaacactatcgtaagcttggtcttgttacagatattgaaggtaatcaagaaataacagaagtttttgcagatgttgaaaaagcgttgctagaactcaaa

SEQ ID NO: 113 - DNA, 560 bp, Streptococcus agalactiae
tggtaaagggactcaagcagctaagattgttgaagaatttggtgttgcgcacatctcaacaggggatatgttccgcgccgcaatggctaatcaaaccgaaatgggacgtttagctaaaagttatattgataaaggtgaattggttcctgatcaagtaacaaacgggattgtaaaagagcgcttagctgaggatgatatcgcagaaaaaggttttttacttgatgggtatccacgtactattgaacaagcacacgccttagatgctacgcttgaagaactaggactacgcttagatggtgttattaatattaaagtggatccatcatgtcttatagagcgtttgagtggtcgtattatcaatcgtaaaactggtgaaactttccacaaagtgttcaacccaccagtagattataaagaagaagattactatcaacgtgaagatgataagcctgaaactgtcaaacgtcgcttggacgttcatattgctcaaggagaacctattcttgaacactatagtaagcttggccttgttacagatattgaaggtaatcaagaaataa

SEQ ID NO: 114 - DNA, 627 bp, Streptococcus agalactiae
aatcttttaaccacgggttcgcctggtgctggtaaaggtactcaagcagctaagatcgttgaagaatttggtgttgctcacatctcaacaggggatatgttccgcgccgcaatggctaatcaaaccgaaatgggacgtttagctaaaagttatattgataaaggtgaattggttcctgatgaagtaacaaacgggattgtaaaagagcgcttagctgaggatgatatcgcagaaaaaggttttttacttgatggatatccacgtactattgaacaagcacacgccttagatgctacgcttgaagaactaggactacgcttagatggtgttattaatattaaagtggatccatcatgtcttatagagcgtttgagtggtcgtattatcaatcgtaaaactggtgaaactttccacaaagtgttcaacccaccagtagattataaagaagaagattactatcaacgtgaagatgataagcctgaaactgtcaaacgtcgcttggacgttaatattgctcaaggagaacctattcttgaacactatcgtaagcttggtcttgttacagatattgaaggtaatcaagaaataacagaagtttttgcagatgttgaaaaagcgttgctagaa

SEQ ID NO: 115 - DNA, 621 bp, Streptococcus agalactiae; identical to SEQ ID NO: 111

SEQ ID NO: 116 - DNA, 578 bp, Streptococcus agalactiae
aatcttttaattatgggtttgcctggtgctggtaaaggtactcaagcagctaagatcgttgaagaatttggtgttgctcacatctcaacaggggatatgttccgcgccgcaatggctaatcaaaccgaaatgggacgtttagctaaaagttatattgataaaggtgaattggttcctgatgaagtaacaaacgggattgtaaaagagcgcttagctgaggatgatatcgcagaaaaaggttttttacttgatggatatccacgtactattgaacaagcacacgccttagatgctacgcttgaagaactaggactacgcttagatggtgttattaatattaaagtggatccatcatgtcttatagagcgtttgagtggtcgtattatcaatcgtaaaactggtgaaactttccacaaagtgttcaacccaccagtagattataaagaagaagattactatcaacgtgaagatgataagcctgaaactgtcaaacgtcgcttggacgttaatattgctcaaggagaatctattcttgaacactatcgaaagcttggtcttgttacagatattgaaggtaa

SEQ ID NO: 117 - DNA, 545 bp, Streptococcus agalactiae
aatcttttaaccacgggtttgcttggtgctggtaaaggtactcaagcagctaagatcgttgaagaatttggtgttgctcacatctcaacaggggatatgttccgcgccgcaatggctaatcaaaccgaaatgggacgtttagctaaaagttatattgataaaggtgaattggttcctgatgaagtaacaaacgggattgtaaaagagcgcttagctgaggatgatatcgcagaaaaaggttttttacttgatggatatccacgtactattgaacaagcacacgccttagatgctacgcttgaagaactaggactacgcttagatggtgttattaatattaaagtggatccatcatgtcttatagagcgtttgagtggtcgtattatcaatcgtaaaactggtgaaactttccacaaagtgttcaacccaccagtagattataaagaagaagattactatcaacgtgaagatgataagcctgaaactgtcaaacgtcgcttggacgttaatattgctcaaggagaacctattcttgaacactatag

SEQ ID NO: 118 - DNA, 624 bp, Streptococcus agalactiae
atcttttaattatgggtttgcctggtgctggtaaaggtactcaagcagctaagattgttgaagaatttggtgttgctcacatctcaacaggggatatgttccgcgccgcaatggctaatcaaacccaaatgggacgtttagctaaaagttatattgataaaggtgaattggttcctgatgaagtaacaaacgggattgtaaaagagcgcttagctgaggatgatatcgcagaaaaaggttttttacttgatggatatccacgtactattgagcaagcacacgccttagatgctacgcttgaagaactaggactacgcttagatggtgttattaatattaaagtggatccaacatgccttatagagcgtttgagtggccgtattatcaatcgtaaaactggtgaaactttccacaaagtgttcaacccaccagtagattataaagaagaagattactatcaacgtgaagatgataagcctgaaactgtcaaacgtcgcttggacgttaatattgctcaaggagaacctattcttgaacactatcgtaagcttggtcttgttacagatattgaaggtaatcaagaaataacagaagtttttgcagatgttgaaaaagcgttgctag

SEQ ID NO: 119 - DNA, 535 bp, Streptococcus agalactiae
caggggatatgttccgcgccgcaatggctaatcaaaccgaaatgggacgtttagctaaaagttatattgataaaggtgaattggttcctgatgaagtaacaaacgggattgtaaaagagcgcttagctgaggatgatatcgcagaaaaaggttttttacttgatggatatccacgtactattgaacaagcacacgccttagatgctacgcttgaagaactaggactacgcttagatggtgttattaatattaaagtggatccatcatgtcttatagagcgtttgagtggtcgtattatcaatcgtaaaactggtgaaactttccacaaagtgttcaacccaccagtagattataaagaagaagattactatcaacgtgaagatgataagcctgaaactgtcaaacgtcgcttggacgttaatattgctcaaggagaatctattcttgaacactatcgtaagcttggtcttgttacagatattgaaggtaatcaagaaataacagaagtttttgcagatgttgaaaaagcgttgct

SEQ ID NO: 120 - DNA, 581 bp, Streptococcus agalactiae
aatcttttaattatgggtttgcctggtgctggtaaaggtactcaagcagctaagatcgttgaagaatttggtgttgctcacatctcaacaggggatatgttccgcgccgcaatggctaatcaaaccgaaatgggacgtttagctaaaagttatattgataaaggtgaattggttcctgatgaagtaacaaacgggattgtaaaagagcgcttagctgaggatgatatcgcagaaaaaggttttttacttgatggatatccacgtactattgaacaagcacacgccttagatgctacgcttgaagaactaggactacgcttagatggtgttattaatattaaagtggatccatcatgtcttatagagcgtttgagtggtcgtattatcaatcgtaaaactggtgaaactttccacaaagtgttcaacccaccagtagattataaagaagaagattactatcaacgtgaagatgataagcctgaaactgttaaacgtcgcttggacgttaatattgctcaaggagaacctattcttgaacactataaaaagcttggtcttgttacagatattgaaggtaatca

SEQ ID NO: 121 - DNA, 630 bp, Streptococcus agalactiae
cttttaattatgggtttgcctggtgctggtaaaggtactcaagcagctaagattgttgaagaatttggtgttgctcacatctcaacaggggatatgttccgcgccgcaatggctaatcaaacccaaatgggacgtttagctaaaagttatattgataaaggtgaattggttcctgatgaagtaacaaacgggattgtaaaagagcgcttagctgaggatgatatcgcagaaaaaggttttttacttgatggatatccacgtactattgagcaagcacacgccttagatgctacgcttgaagaactaggactacgcttagatggtgttattaatattaaagtggatccaacatgccttatagagcgtttgagtggccgtattatcaatcgtaaaactggtgaaactttccacaaagtgttcaacccaccagtagattataaagaagaagattactatcaacgtgaagatgataagcctgaaactgtcaaacgtcgcttggacgttaatattgctcaaggagaacctattcttgaacactatcgtaagcttggtcttgttacagatattgaaggtaatcaagaaataacagaagtttttgcagatgttgaaaaagcgttgctagaactcaaa

SEQ ID NO: 122 - DNA, 519 bp, Streptococcus agalactiae
aatcttttaattacgggtttgcctggtgctggtaaaggtactcaagcagctaagattgttgaagaatttggtgttgctcacatctcaacaggggatatgttccgcgccgcaatggctaatcaaacccaaatgggacgtttagctaaaagttatattgataaaggtgaattggttcctgatgaagtaacaaacgggattgtaaaagagcgcttagctgaggatgatatcgcagaaaaaggttttttacttgatggatatccacgtactattgagcaagcacacgccttagatgctacgcttgaagaactaggactacgcttagatggtgttattaatattaaagtggatccaacatgccttatagagcgtttgagtggccgtattatcaatcgtaaaactggtgaaactttccacaaagtgttcaacccaccagtagattataaagaagaagattactatcaacgtgaagatgataagcctgaaactgtcaaacgtcgcttggacgttaatattgctcaa

SEQ ID NO: 123 - protein, 211 aa, Streptococcus agalactiae
NLLIMGLPGAGKGTQAAKIVEEFGVAHISTGDMFRAAMANQTEMGRLAKSYIDKGELVPDEVTNGIVKERLAEDDIAEKGFLLDGYPRTIEQAHALDATLEELGLRLDGVINIKVDPSCLIERLSGRIINRKTGETFHKVFNPPVDYKEEDYYQREDDKPETVKRRLDVNIAQGEPILEHYRKLGLVTDIEGNQEITEVFADVEKALLELK

SEQ ID NO: 124 - protein, 186 aa, Streptococcus agalactiae
GKGTQAAKIVEEFGVAHISTGDMFRAAMANQTEMGRLAKSYIDKGELVPDQVTNGIVKERLAEDDIAEKGFLLDGYPRTIEQAHALDATLEELGLRLDGVINIKVDPSCLIERLSGRIINRKTGETFHKVFNPPVDYKEEDYYQREDDKPETVKRRLDVHIAQGEPILEHYSKLGLVTDIEGNQEI

SEQ ID NO: 125 - protein, 209 aa, Streptococcus agalactiae
NLLTTGSPGAGKGTQAAKIVEEFGVAHISTGDMFRAAMANQTEMGRLAKSYIDKGELVPDEVTNGIVKERLAEDDIAEKGFLLDGYPRTIEQAHALDATLEELGLRLDGVINIKVDPSCLIERLSGRIINRKTGETFHKVFNPPVDYKEEDYYQREDDKPETVKRRLDVNIAQGEPILEHYRKLGLVTDIEGNQEITEVFADVEKALLE

SEQ ID NO: 126 - protein, 207 aa, Streptococcus agalactiae
NLLIMGLPGAGKGTQAAKIVEEFGVAHISTGDMFRAAMANQTEMGRLAKSYIDKGELVPDEVTNGIVKERLAEDDIAEKGFLLDGYPRTIEQAHALDATLEELGLRLDGVINIKVDPSCLIERLSGRIINRKTGETFHKVFNPPVDYKEEDYYQREDDKPETVKRRLDVNIAQGEPILEHYRKLGLVTDIEGNQEITEVFADVEKAL

SEQ ID NO: 127 - protein, 192 aa, Streptococcus agalactiae
NLLIMGLPGAGKGTQAAKIVEEFGVAHISTGDMFRAAMANQTEMGRLAKSYIDKGELVPDEVTNGIVKERLAEDDIAEKGFLLDGYPRTIEQAHALDATLEELGLRLDGVINIKVDPSCLIERLSGRIINRKTGETFHKVFNPPVDYKEEDYYQREDDKPETVKRRLDVNIAQGESILEHYRKLGLVTDIEG

SEQ ID NO: 128 - protein, 192 aa, Streptococcus agalactiae; identical to SEQ ID NO: 127

SEQ ID NO: 129 - protein, 181 aa, Streptococcus agalactiae
NLLTTGLLGAGKGTQAAKIVEEFGVAHISTGDMFRAAMANQTEMGRLAKSYIDKGELVPDEVTNGIVKERLAEDDIAEKGFLLDGYPRTIEQAHALDATLEELGLRLDGVINIKVDPSCLIERLSGRIINRKTGETFHKVFNPPVDYKEEDYYQREDDKPETVKRRLDVNIAQGEPILEHY

SEQ ID NO: 130 - protein, 207 aa, Streptococcus agalactiae
LLIMGLPGAGKGTQAAKIVEEFGVAHISTGDMFRAAMANQTQMGRLAKSYIDKGELVPDEVTNGIVKERLAEDDIAEKGFLLDGYPRTIEQAHALDATLEELGLRLDGVINIKVDPTCLIERLSGRIINRKTGETFHKVFNPPVDYKEEDYYQREDDKPETVKRRLDVNIAQGEPILEHYRKLGLVTDIEGNQEITEVFADVEKALL

SEQ ID NO: 131 - protein, 177 aa, Streptococcus agalactiae
GDMFRAAMANQTEMGRLAKSYIDKGELVPDEVTNGIVKERLAEDDIAEKGFLLDGYPRTIEQAHALDATLEELGLRLDGVINIKVDPSCLIERLSGRIINRKTGETFHKVFNPPVDYKEEDYYQREDDKPETVKRRLDVNIAQGESILEHYRKLGLVTDIEGNQEITEVFADVEKAL

SEQ ID NO: 132 - protein, 193 aa, Streptococcus agalactiae
NLLIMGLPGAGKGTQAAKIVEEFGVAHISTGDMFRAAMANQTEMGRLAKSYIDKGELVPDEVTNGIVKERLAEDDIAEKGFLLDGYPRTIEQAHALDATLEELGLRLDGVINIKVDPSCLIERLSGRIINRKTGETFHKVFNPPVDYKEEDYYQREDDKPETVKRRLDVNIAQGEPILEHYKKLGLVTDIEGN

SEQ ID NO: 133 - protein, 210 aa, Streptococcus agalactiae
LLIMGLPGAGKGTQAAKIVEEFGVAHISTGDMFRAAMANQTQMGRLAKSYIDKGELVPDEVTNGIVKERLAEDDIAEKGFLLDGYPRTIEQAHALDATLEELGLRLDGVINIKVDPTCLIERLSGRIINRKTGETFHKVFNPPVDYKEEDYYQREDDKPETVKRRLDVNIAQGEPILEHYRKLGLVTDIEGNQEITEVFADVEKALLELK

SEQ ID NO: 134 - protein, 173 aa, Streptococcus agalactiae
NLLITGLPGAGKGTQAAKIVEEFGVAHISTGDMFRAAMANQTQMGRLAKSYIDKGELVPDEVTNGIVKERLAEDDIAEKGFLLDGYPRTIEQAHALDATLEELGLRLDGVINIKVDPTCLIERLSGRIINRKTGETFHKVFNPPVDYKEEDYYQREDDKPETVKRRLDVNIAQ

SEQ ID NO: 135 - DNA, 669 bp, Streptococcus agalactiae
aagcctaacagtcaacaatcatcatctcaaaagttgaggaatgaggatataaaaaagatatcctctcaaaaaagaaataagaaattacaattaccagctgtatcatcaaaagattggaacttgattttggtcaatcgtgaccataaacatgaagaattaagtccagatgtggttcctgttgaaaatatttatttggataaacgtattacgaagcaagctactcagtttttagaggctgctagagcaattgattcacgagaacatttaatttcgggttatcgtagtgttgcctatcaggagaagttgttcaattcttatgttactcaagagatgactagtaaccctaatttgacgaggggacaagcagaaaagttggtaaaaacttactctcagcctgcaggtgctagtgaacaccagactggattagcgatggatatgagtactgtagattctttgaatgagagcgatcctagagtagtcagtcagttgaaaaagatagctccacaatatggttttgtcttacggtttccggatggtaaaacagcagaaacaggggtaggttatgaagattggcattaccgctatgttggggtagagtctgcaaaatatatggccaaacatcatttaacattagaagaatacataactttattaaaggagaataaccaa

SEQ ID NO: 136 - DNA, 669 bp, Streptococcus agalactiae
aagcctaacagtcaacaatcatcacctcaaaagttgaggaatgaggatataaaaaagatatcctctcaaaaaagaaataagaaattacgattaccagctgtatcatcaaaagattggaacttgattttggtcaatcgtgaccataaacatgaagaattaagtccagatgtggtgcctgttgaaaatatttatttggataaacgtattacgaagcaagctactcagtttttagaggctgctagagcaattgattcacgagaacatttaatttcgggttatcgtagtgttgcctatcaggagaagttgttcaattcttatgttactcaagagatgactagtaaccctaatttgacgaggggacaagcagaaaagttggtaaaaacttactctcagcctgcaggtgctagtgaacaccagactggattagcgatggatatgagtactgtagattctttgaatgagagcgatcctagagtagtcagtcagttgaaaaagatagctccacaatatggttttgtcttacggtttccggatggtaaaacagcagaaacaggggtaggttatgaagattggcattaccgctatgttggggtagagtctgcaaaatatatggccgaacatcgtttaacattagaagaatacataactttattaaaggagaataaccaa

SEQ ID NO: 137 - DNA, 669 bp, Streptococcus agalactiae; identical to SEQ ID NO: 135

SEQ ID NO: 138 - DNA, 682 bp, Streptococcus agalactiae
acagtcaacaatcatcatctcaaaagttgaggaatgaggatataaaaaagatatcctctcaaaaaagaaataagaaattacaattaccagctgtatcatcaaaagattggaacttgattttggtcaatcgtgaccataaacatgaagaattaagtccagatgtggttcctgttgaaaatatttatttggataaacgtattacgaagcaagctactcagtttttagaggctgctagagcaattgattcacgagaacatttaatttcgggttatcgtagtgttgcctatcaggagaagttgttcaattcttatgttactcaagagatgactagtaaccctaatttgacgaggggacaagcagaaaagttggtaaaaacttactctcagcctgcaggtgctagtgaacaccagactggattagcgatggatatgagtactgtagattctttgaatgagagcgatcctagagtagtcagtcagttgaaaaagatagctccacaatatggttttgtcttacggtttccggatggtaaaacagcagaaacaggggtaggttatgaagattggcattaccgctatgttggggtagagtctgcaaaatatatggccaaacatcatttaacattagaagaatacataactttattaaaggagaataaccaaaacccagctttcttgtacaa

SEQ ID NO: 139 - DNA, 669 bp, Streptococcus agalactiae
aagcctaacagtcaacaatcatcatctcaaaagttgaggaatgaggatataaaaaagacatcctctcaaaaaagaaataagaaattacgattaccagctgtatcatcaaaagattggaacttgattttggtcaatcgtgaccataaacatgaagaattaagtccagatgtggtgcctgttgaaaatatttatttggataaacgtattacgaagcaagctactcagtttttagaggctgctagagcaattgattcacgagaacatttaatttcgggttatcgtagtgttgcctatcaggagaagttgttcaattcttatgttactcaagaaatgactagtaaccctaatttgacgaaggaacaagcagaaaagttggtaaaaacttactctcagcctgcaggtgctagtgaacaccagactggattagcgatggatatgagtactgtagattctttgaatgagagcgatcctagagtagtcagtcagttgaaaaagatagctccacaatatggttttgtcttacggtttccggatggtaaaacagcagaaacaggggtaggttatgaagattggcattaccgctatgttggggtagagtctgcaaaatatatggccaaacatcatttaacattagaagaatacataactttattaaaggagaataaccaa

SEQ ID NO: 140 - DNA, 670 bp, Streptococcus agalactiae
aagcctaacagtcaacaatcatcatctcaaaagttgaggaatgaggatataaaaaagatatcctctcaaaaaagaaataagaaatttacaattaccagctgtatcatcaaaagattggaacttgattttggtcaatcgtgaccataaacatgaagaattaagtccagatgtggttcctgttgaaaatatttatttggataaacgtattacgaagcaagctactcagtttttagaggctgctagagcaattgattcacgagaacatttaatttcgggttatcgtagtgttgcctatcaggagaagttgttcaattcttatgttactcaagagatgactagtaaccctaatttgacgaggggacaagcagaaaagttggtaaaaacttactctcagcctgcaggtgctagtgaacaccagactggattagcgatggatatgagtactgtagattctttgaatgagagcgatcctagagtagtcagtcagttgaaaaagatagctccacaatatggttttgtcttacggtttccggatggtaaaacagcagaaacaggggtaggttatgaagattggcattaccgctatgttggggtagagtctgcaaaatatatggccaaacatcatttaacattagaagaatacataactttattaaaggagaataaccaa

SEQ ID NO: 141 - DNA, 687 bp, Streptococcus agalactiae
cctaacagtcaacaatcatcatctcaaaagttgaggaatgaggatataaaaaagacatcctctcaaaaaagaaattaagaaattacgattaccagctgtatcatcaaaagattggaacttgattttggtcaatcgtgaccataaacatgaagaattaagtccagatgtggtgcctgttgaaaatatttatttggataaacgtattacgaagcaagctactcagtttttagaggctgctagagcaattgattcacgagaacatttaatttcgggttatcgtagtgttgcctatcaggagaagttgttcaattcttatgttactcaagagatgactagtaaccctaatttgacgaggggacaagcagaaaagttggtaaaaacttactctcagcctgcaggtgctagtgaacaccagactggattagcgatggatatgagtactgtagattctttgaatgagagcgatcctagagtagtcagtcagttgaaaaagatagctccacaatatggttttgtcttacggtttccggatggtaaaacagcagaaacaggggtaggttatgaagattggcattaccgctatgttggggtagagtctgcaaaatatatggtcaaacatcatttaacattagaagaatacataactttattaaaggagaataaccaaaacccagctttcttgtacaa

SEQ ID NO: 142 - DNA, 669 bp, Streptococcus agalactiae
aagcctaacagtcaacaatcatcatctcaaaagttgaggaatgaggatataaaaaagacatcctctcaaaaaagaaataagaaattacgattaccagctgtatcatcaaaagattggaacttgattttggtcaatcgtgaccataaacatgaagaattaagtccagatgtggtgcctgttgaaaatatttatttggataaacgtattacgaagcaagctactcagtttttagaggctgctagagcaattgattcacgagaacatttaatttcgggttatcgtagtgttgcctatcaggagaagttgttcaattcttatgttactcawgaaatgactagtaaccctaatttgacgaaggaacaagcagaaaagttggtaaaaacttactctcagcctgcaggtgctagtgaacaccagactggattagcgatggatatgagtactgtagattctttgaatgagagcgatcctagagtagtcagtcagttgaaaaagatagctccacaatatggttttgtcttacggtttccggatggtaaaacagcagaaacaggggtaggttatgaagattggcattaccgctatgttggggtagagtctgcaaaatatatggccaaacatcatttaacattagaagaatacataactttattaaaggagaataaccaa

SEQ ID NO: 143 - DNA, 669 bp, Streptococcus agalactiae; identical to SEQ ID NO: 135

SEQ ID NO: 144 - DNA, 682 bp, Streptococcus agalactiae
agcctaacagtcaacaatcatcatctcaaaagttgaggaatgaggatataaaaaagacatcctctcaaaaaagaaataagaaattacgattaccagctgtatcatcaaaagattggaacttgattttggtcaatcgtgaccataaacatgaagaattaagtccagatgtggtgcctgttgaaaatatttatttggataaacgtattacgaagcaagctactcagtttttagaggctgctagagcaattgattcacgagaacatttaatttcgggttatcgtagtgttgcctatcaggagaagttgttcaattcttatgttactcaagagatgactagtaaccctaatttgacgaggggacaagcagaaaagttggtaaaaacttactctcagcctgcaggtgctagtgaacaccagactggattagcgatggatatgagtactgtagattctttgaatgagagcgatcctagagtagtcagtcagttgaaaaagatagctccacaatatggttttgtcttacggtttccggatggtaaaacagcagaaacaggggtaggttatgaagattggcattaccgctatgttggggtagagtctgcaaaatatatggtcaaacatcatttaacattagaagaatacataactttattaaaggagaataaccaaaacccagctttctt

SEQ ID NO: 145 - DNA, 669 bp, Streptococcus agalactiae
aagcctaacagtcaacaatcatcatctcaaaagttgaggaatgaggatataaaaaagacatcctctcaaaaaagaaataagaaattacgattaccagctgtatcatcaaaagattggaacttgattttggtcaatcgtgaccataaacatgaagaattaagtccagatgtggtgcctgttgaaaatatttatttggataaacgtattacgaagcaagctactcagtttttagaggctgctagagcaattgattcacgagaacatttaatttcgggttatcgtagtgttgcctatcaggagaagttgttcaattcttatgttactcaagagatgactagtaaccctaatttgacgaggggacaagcagaaaagttggtaaaaacttactctcagcctgcaggtgctagtgaacaccagactggattagcgatggatatgagtactgtagattctttgaatgagagcgatcctagagtagtcagtcagttgaaaaagatagctccacaatatggttttgtcttacggtttccggatggtaaaacagcagaaacaggggtaggttatgaagattggcattaccgctatgttggggtagagtctgcaaaatatatggtcaaacatcatttaacattagaagaatacataactttattaaaggagaataaccaa

SEQ ID NO: 146 - protein, 223 aa, Streptococcus agalactiae
KPNSQQSSSQKLRNEDIKKISSQKRNKKLQLPAVSSKDWNLILVNRDHKHEELSPDVVPVENIYLDKRITKQATQFLEAARAIDSREHLISGYRSVAYQEKLFNSYVTQEMTSNPNLTRGQAEKLVKTYSQPAGASEHQTGLAMDMSTVDSLNESDPRVVSQLKKIAPQYGFVLRFPDGKTAETGVGYEDWHYRYVGVESAKYMAKHHLTLEEYITLLKENNQ

SEQ ID NO: 147 - protein, 223 aa, Streptococcus agalactiae
KPNSQQSSPQKLRNEDIKKISSQKRNKKLRLPAVSSKDWNLILVNRDHKHEELSPDVVPVENIYLDKRITKQATQFLEAARAIDSREHLISGYRSVAYQEKLFNSYVTQEMTSNPNLTRGQAEKLVKTYSQPAGASEHQTGLAMDMSTVDSLNESDPRVVSQLKKIAPQYGFVLRFPDGKTAETGVGYEDWHYRYVGVESAKYMAEHRLTLEEYITLLKENNQ

SEQ ID NO: 148 - protein, 223 aa, Streptococcus agalactiae; identical to SEQ ID NO: 146

SEQ ID NO: 149 - protein, 226 aa, Streptococcus agalactiae
SQQSSSQKLRNEDIKKISSQKRNKKLQLPAVSSKDWNLILVNRDHKHEELSPDVVPVENIYLDKRITKQATQFLEAARAIDSREHLISGYRSVAYQEKLFNSYVTQEMTSNPNLTRGQAEKLVKTYSQPAGASEHQTGLAMDMSTVDSLNESDPRVVSQLKKIAPQYGFVLRFPDGKTAETGVGYEDWHYRYVGVESAKYMAKHHLTLEEYITLLKENNQNPAFLY

SEQ ID NO: 150 - protein, 223 aa, Streptococcus agalactiae
KPNSQQSSSQKLRNEDIKKTSSQKRNKKLRLPAVSSKDWNLILVNRDHKHEELSPDVVPVENIYLDKRITKQATQFLEAARAIDSREHLISGYRSVAYQEKLFNSYVTQEMTSNPNLTKEQAEKLVKTYSQPAGASEHQTGLAMDMSTVDSLNESDPRVVSQLKKIAPQYGFVLRFPDGKTAETGVGYEDWHYRYVGVESAKYMAKHHLTLEEYITLLKENNQ

SEQ ID NO: 151 - protein, 46 aa, Streptococcus agalactiae
KPNSQQSSSQKLRNEDIKKISSQKRNKKFTITSCIIKRLELDFGQS

SEQ ID NO: 152 - protein, 25 aa, Streptococcus agalactiae
PNSQQSSSQKLRNEDIKKTSSQKRN

SEQ ID NO: 153 - protein, 223 aa, Streptococcus agalactiae
  VARIANT 109: Xaa = Any Amino Acid
KPNSQQSSSQKLRNEDIKKTSSQKRNKKLRLPAVSSKDWNLILVNRDHKHEELSPDVVPVENIYLDKRITKQATQFLEAARAIDSREHLISGYRSVAYQEKLFNSYVTXEMTSNPNLTKEQAEKLVKTYSQPAGASEHQTGLAMDMSTVDSLNESDPRVVSQLKKIAPQYGFVLRFPDGKTAETGVGYEDWHYRYVGVESAKYMAKHHLTLEEYITLLKENNQ

SEQ ID NO: 154 - protein, 223 aa, Streptococcus agalactiae; identical to SEQ ID NO: 146

SEQ ID NO: 155 - protein, 226 aa, Streptococcus agalactiae
PNSQQSSSQKLRNEDIKKTSSQKRNKKLRLPAVSSKDWNLILVNRDHKHEELSPDVVPVENIYLDKRITKQATQFLEAARAIDSREHLISGYRSVAYQEKLFNSYVTQEMTSNPNLTRGQAEKLVKTYSQPAGASEHQTGLAMDMSTVDSLNESDPRVVSQLKKIAPQYGFVLRFPDGKTAETGVGYEDWHYRYVGVESAKYMVKHHLTLEEYITLLKENNQNPAF

SEQ ID NO: 156 - protein, 223 aa, Streptococcus agalactiae
KPNSQQSSSQKLRNEDIKKTSSQKRNKKLRLPAVSSKDWNLILVNRDHKHEELSPDVVPVENIYLDKRITKQATQFLEAARAIDSREHLISGYRSVAYQEKLFNSYVTQEMTSNPNLTRGQAEKLVKTYSQPAGASEHQTGLAMDMSTVDSLNESDPRVVSQLKKIAPQYGFVLRFPDGKTAETGVGYEDWHYRYVGVESAKYMVKHHLTLEEYITLLKENNQ

SEQ ID NO: 157 - DNA, 934 bp, Streptococcus agalactiae
ggcagtagaagtaaatgctcaagatatttatatcattcccaaaggtgattgttatgaactctatatgcgtattgatgatgaaaggcggtttattgatgtttttgagtttaataggatggctagtcttattagtcactttaaatttgtggcaggcatgaacgttggagaaaaaagacgaagtcaattaggttcttgtgactatgaactgtcagagggaagactggtttcattacgactatcgagtgtgggagattatcgtggtcaagaatctttagttattcgtattttgtattcaggtcatcaggacttaaaatattggtttgataatataaagcaaatgaaggaagtactgggtacaagagggctatatcttttttccggccctgtggggagtggtaaaacaactctcatgtatcaattagcttcagaagtatttaaaaataagcaaattatcacgattgaagatccggtagaaatcaagaatgacaagatgttacaactccaattgaatgaggatattggaatgacttatgatgctttaatcaaactgtctttacggcatcgtccagatattttaattatcggagagattagagatcaagcgacggcccgtgctgttattcgtgcaagtttaacgggagtgatggttttttctactattcatgctaaaagtatttccggagtctatgataggcttatagaattaggggttaactatcaagagttagaaaatagtctaaaattaatagcatatcaacgtttaattggaggaggaagcctaattgactttgagacaggtaactttaaaaaacactcatcagacaagtggaatagacaagtggatatcttggctgaagaaggacatatcagtaagaaacaggcacaagtcgaaaaaattatccctcaagaaacaacggaaagtagtccaactttt

SEQ ID NO: 158 - DNA, 896 bp, Streptococcus agalactiae
ggtgattgttatgaaacctctactattgcgtatttgatgatgaaaggcggtttattgatgtttttgagtttaataggatggctagtcttattagtcactttaaatttgtggcaggcatgaacgttggagaaaaaagacgaagtcaattaggttcttgtgactatgaactgtcagagggaagactggtttcattacgactatcgagtgtgggagattatcgtggtcaagaatctttagttattcgtattttgtattcaggtcatcaggacttaaaatattggtttgataatataaagcaaatgaaggaagtactgggtacaagagggctatatcttttttccggccctgtggggagtggtaaaacaactctcatgtatcaattagcttcagaagtatttaaaaataagcaaattatcacgattgaagatccggtagaaatcaagaatgacaagatgttacaactccaattgaatgaggatattggaatgacttatgatgctttaatcaaactgtctttacggcatcgtccagatattttaattatcggagagattagagatcaagcgacggctcgtgctgttattcgtgcaagtttaacgggagtgatggttttttctactattcatgctaaaagtattcccggagtctatgataggcttatagaattaggggttaactatcaagagttagaaaatagtctaaaattaatagcatatcaacgtttaattggaggaggaagcctaattgactttgagacaagtaactttaaaaaacactcatcagacaagtggaatagacaagtggatatcttggctgaagaaggatatatcagtaagaaacaggcacaagtcgaaaaaattatccctcaagaaacaacggaaagtagtccaactttt

SEQ ID NO: 159 - DNA, 966 bp, Streptococcus agalactiae
gttcaatcattagcaaagcaagtcattcatcaggcagtagaagtaaatgctcaagatatttatatcattcccaaaggtgattgttatgaactctatatgcgtattgatgatgaaaggcggtttattgatgtttttgagtttaataggatggctagtcttattagtcactttaaatttgtggcaggcatgaacgttggagaaaaaagacgaagtcaattaggttcttgtgactatgaactgtcagagggaagactggtttcattacgactatcgagtgtgggagattatcgtggtcaagaatctttagttattcgtattttgtattcaggtcatcaggacttaaaatattggtttgataatataaagcaaatgaaggaagtactgggtataagagggctatatcttttttccggccctgtggggagtggtaaaacaactctcatgtatcaattagcttcagaagtatttaaaaataagcaaattatcacgattgaagatccggtagaaatcaagaatgacaagatgttacaactccaattgaatgaggatattggaatgacttatgatgctttaatcaaactgtctttacggcatcgtccagatattttaattatcggagagattagagatcaagcgacggcccgtgctgttattcgtgcaagtttaacgggagtgatggttttttctactattcatgctaaaagtattcccggagtctatgataggcttatagaattaggggttaactatcaagagttagaaaatagtctaaaattaatagcatatcaacgtttaattggaggaggaagcctaattgactttgagacaggtaattttaaaaaacactcatcagacaagtggaatagacaagtggatatcttggctgaagaaggacatatcagtaagaaacaggcacaagtcgaaaaaattatccctcaagaaacaacggaaagtagtccaactttt

SEQ ID NO: 160 - DNA, 913 bp, Streptococcus agalactiae
gatatttatatcattcccaaaggtgattgttatgaactctatatgcgtattgatgatgaaaggcggtttattgatgtttttgagtttaataggatggctagtcttattagtcactttaaatttgtggcaggcatgaacgttggagaaaaaagacgaagtcaattaggttcttgtgactatgaactgtcagagggaagactggtttcattacgactatcgagtgtgggagattatcgtggtcaagaatctttagttattcgtattttgtattcaggtcatcaggacttaaaatattggtttgataatataaagcaaatgaaggaagtactgggtataagagggctatatcttttttccggccctgtggggagtggtaaaacaactctcatgtatcaattagcttcagaagtatttaaaaataagcaaattatcacgattgaagatccggtagaaatcaagaatgacaagatgttacaactccaattgaatgaggatattggaatgacttatgatgctttaatcaaactgtctttacggcatcgtccagatattttaattatcggagagattagagatcaagcgacggcccgtgctgttattcgtgcaagtttaacgggagtgatggttttttctactattcatgctaaaagtattcccggagtctatgataggcttatagaattaggggttaactatcaagagttagaaaatagtctaaaattaatagcatatcaacgtttaattggaggaggaagcctaattgactttgagacaggtaattttaaaaaacactcatcagacaagtggaatagacaagtggatatcttggctgaagaaggacatatcagtaagaaacaggcacaagtgcgaaaaaattatccctcaagaaacaacggaaagtagtccaactttt

SEQ ID NO: 161 - DNA, 966 bp, Streptococcus agalactiae; identical to SEQ ID NO: 159

SEQ ID NO: 162 - DNA, 966 bp, Streptococcus agalactiae
gttcaatcattagcaaagcaagtcattcatcaggcagtagaagtaaatgctcaagatatttatatcattcccaaaggtgattgttatgaactctatatgcgtattgatgatgaaaggcggtttattgatgtttttgagtttaataggatggctagtcttattagtcactttaaatttgtggcaggcatgaacgttggagaaaaaagacgaagtcaattaggttcttgtgactatgaactgtcagagggaagactggtttcattacgactatcgagtgtgggagattatcgtggtcaagaatctttagttattcgtattttgtattcaggtcatcaggacttaaaatattggtttgataatataaagcaaatgaaggaagtactgggtacaagagggctatatcttttttccggccctgtggggagtggtaaaacaactctcatgtatcaattagcttcagaagtatttaaaaataagcaaattatcacgattgaagatccggtagaaatcaagaatgacaagatgttacaactccaattgaatgaggatattggaatgacttatgatgctttaatcaaactgtctttacggcatcgtccagatattttaattatcggagagattagagatcaagcgacggcccgtgctgttattcgtgcaagtttaacgggagtgatggttttttctactattcatgctaaaagtatttccggagtctatgataggcttatagaattaggggttaactatcaagagttagaaaatagtctaaaattaatagcatatcaacgtttaattggaggaggaagcctaattgactttgagacaggtaactttaaaaaacactcatcagacaagtggaatagacaagtggatatcttggctgaagaaggacatatcagtaagaaacaggcacaagtcgaaaaaattatccctcaagaaacaacggaaagtagtccaactttt

SEQ ID NO: 163 - DNA, 893 bp, Streptococcus agalactiae
aggtgattgttatgaaattctatatgcgtattgatgatgaaaggcggtttattgatgtttttgagtttaataggatggctagtcttattagtcactttaaatttgtggcaggcatgaacgttggagaaaaaagacgaagtcaattaggttcttgtgactatgaactgtcagagggaagactggtttcattacgactatcaagtgtgggagattatcgtggtcaagaatctttagttattcgtactttgtattcaggtcatcaggacttaaaatattggtttgataatataaagtaaatgaaggaagtactgtgtgcaagagggctatatcttttttccggccctgtggggagtggtaaaacaactctcatgtatcaattagcttcagaagtatttaaaaataagcaaattatcacgattgaagatccggtagaaatcaagaatgacaagatgttacaactccaattgaatgaggatattggaatgacttatgatgctttaatcaaactgtctttacggcatcgtccagatattttaattatcggagagattagagatcaagcgacggcccgtgctgttattcgtgcaagtttaacgggagtaatggttttttctactattcatgctaaaagtattcccggagtctatgataggcttatagaattaggggttaactatcaagagttagaaaatagtctaaaattaatagcatatcaacgtttaattggaggaggaagcctaattgactttgagacaagtaactttaaaaaacactcatcagacaagtggaatagacaagtggatatcttggctgaagaaggacatatcagtaagaaacaggcacaagtcgaaaaaattatccctcaagaaacaacggaaagtagtccaactttt

SEQ ID NO: 164 - DNA, 961 bp, Streptococcus agalactiae
tcattagcaaagcaagtcattcatcaggcagtagaagtaaatgctcaagatatttatatcattcccaaaggtgattgttatgaactctatatgcgtattgatgatgaaaggcggtttattgatgtttttgagtttaataggatggctagtcttattagtcactttaaatttgtggcaggcatgaacgttggagaaaaaagacgaagtcaattaggttcttgtgactatgaactgtcagagggaagactggtttcattacgactatcgagtgtgggagattatcgtggtcaagaatctttagttattcgtattttgtattcaggtcatcaggacttaaaatattggtttgataatataaagcaaatgaaggaagtactgggtataagagggctatatcttttttccggccctgtggggagtggtaaaacaactctcatgtatcaattagcttcagaagtatttaaaaataagcaaattatcacgattgaagatccggtagaaatcaagaatgacaagatgttacaactccaattgaatgaggatattggaatgacttatgatgctttaatcaaactgtctttacggcatcgtccagatattttaattatcggagagaaatagagatcaagcgacggcccgtgctgttattcgtgcaagtttaacgggagtgatgtttttttctactattcatgctaaaagtattcccggagtctatgataggcttatagaattaggggttaactatcaagagttagaaaatagtctaaaattaatagcatatcaacgtttaattggaggaggaagcctaattgactttgagacaggtaattttaaaaaacactcatcagacaagtggaatagacaagtggatatcttggctgaagaaggacatatcagtaagaaacaggcacaagtcgaaaaaattatccctcaagaaacaacggaaagtagtccaactttt

SEQ ID NO: 165 - DNA, 966 bp, Streptococcus agalactiae; identical to SEQ ID NO: 159

SEQ ID NO: 166 - DNA, 893 bp, Streptococcus agalactiae
tgacttgttatgaaactctatatgcgtatttgatgatgaaaaggcggtttattgatgtttttgagtttaataggatggctagtcttattagtcactttaaatttgtggcaggcatgaacgttggagaaaaaagacgaagtcaattaggttcttgtgactatgaactgtcagagggaagactggtttcattacgactatcaagtgtgggagattatcgtggtcaagaatctttagttattcgtactttgtattcaggtcatcaggacttaaaatattggtttgataatataaagtaaatgaaggaagtactgtgtgcaagagggctatatcttttttccggccctgtggggagtggtaaaacaactctcatgtatcaattagcttcagaagtatttaaaaataagcaaattatcacgattgaagatccggtagaaatcaagaatgacaagatgttacaactccaattgaatgaggatattggaatgacttatgatgctttaatcaaactgtctttacggcatcgtccagatattttaattatcggagagattagagatcaagcgacggcccgtgctgttattcgtgcaagtttaacgggagtaatggttttttctactattcatgctaaaagtattcccggagtctatgataggcttatagaattaggggttaactatcaagagttagaaaatagtctaaaattaatagcatatcaacgtttaattggaggaggaagcctaattgactttgagacaagtaactttaaaaaacactcatcagacaagtggaatagacaagtggatatcttggctgaagaaggacatatcagtaagaaacaggcacaagtcgaaaaaattatccctcaagaaacaacggaaagtagtccaactttt

SEQ ID NO: 167 - DNA, 932 bp, Streptococcus agalactiae
cagtagaagtaaatgctcaagatatttatatcattcccaaaggtgattgttatgaattctatatgcgtattgatgatgaaaggcggtttattgatgtttttgagtttaataggatggctagtcttattagtcactttaaatttgtggcaggcatgaacgttggagaaaaaagacgaagtcaattaggttcttgtgactatgaactgtcagagggaagactggtttcattacgactatcaagtgtgggagattatcgtggtcaagaatctttagttattcgtactttgtattcaggtcatcaggacttaaaatattggtttgataatataaagcaaatgaaggaagtactgtgtgcaagagggctatatcttttttccggccctgtggggagtggtaaaacaactctcatgtatcaattagcttcagaagtatttaaaaataagcaaattatcacgattgaagatccggtagaaatcaagaatgacaagatgttacaactccaattgaatgaggatattggaatgacttatgatgctttaatcaaactgtctttacggcatcgtccagatattttaattatcggagagattagagatcaagcgacggcccgtgctgttattcgtgcaagtttaacgggagtaatggttttttctactattcatgctaaaagtattcccggagtctatgataggcttatagaattaggggttaactatcaagagttagaaaatagtctaaaattaatagcatatcaacgtttaattggaggaggaagcctaattgactttgagacaagtaactttaaaaaacactcatcagacaagtggaatagacaagtggatatcttggctgaagaaggacatatcagtaagaaacaggcacaagtcgaaaaaattatccctcaagaaacaacggaaagtagtccaactttt

SEQ ID NO: 168 - protein, 311 aa, Streptococcus agalactiae
AVEVNAQDIYIIPKGDCYELYMRIDDERRFIDVFEFNRMASLISHFKFVAGMNVGEKRRSQLGSCDYELSEGRLVSLRLSSVGDYRGQESLVIRILYSGHQDLKYWFDNIKQMKEVLGTRGLYLFSGPVGSGKTTLMYQLASEVFKNKQIITIEDPVEIKNDKMLQLQLNEDIGMTYDALIKLSLRHRPDILIIGEIRDQATARAVIRASLTGVMVFSTIHAKSISGVYDRLIELGVNYQELENSLKLIAYQRLIGGGSLIDFETGNFKKHSSDKWNRQVDILAEEGHISKKQAQVEKIIPQETTESSPTF

SEQ ID NO: 169 - protein, 298 aa, Streptococcus agalactiae
  VARIANT 1, 4: Xaa = Any Amino Acid
XLLXNLYYCVFDDERRFIDVFEFNRMASLISHFKFVAGMNVGEKRRSQLGSCDYELSEGRLVSLRLSSVGDYRGQESLVIRILYSGHQDLKYWFDNIKQMKEVLGTRGLYLFSGPVGSGKTTLMYQLASEVFKNKQIITIEDPVEIKNDKMLQLQLNEDIGMTYDALIKLSLRHRPDILIIGEIRDQATARAVIRASLTGVMVFSTIHAKSIPGVYDRLIELGVNYQELENSLKLIAYQRLIGGGSLIDFETSNFKKHSSDKWNRQVDILAEEGYISKKQAQVEKIIPQETTESSPTF

SEQ ID NO: 170 - protein, 322 aa, Streptococcus agalactiae
VQSLAKQVIHQAVEVNAQDIYIIPKGDCYELYMRIDDERRFIDVFEFNRMASLISHFKFVAGMNVGEKRRSQLGSCDYELSEGRLVSLRLSSVGDYRGQESLVIRILYSGHQDLKYWFDNIKQMKEVLGIRGLYLFSGPVGSGKTTLMYQLASEVFKNKQIITIEDPVEIKNDKMLQLQLNEDIGMTYDALIKLSLRHRPDILIIGEIRDQATARAVIRASLTGVMVFSTIHAKSIPGVYDRLIELGVNYQELENSLKLIAYQRLIGGGSLIDFETGNFKKHSSDKWNRQVDILAEEGHISKKQAQVEKIIPQETTESSPTF

SEQ ID NO: 171 - protein, 304 aa, Streptococcus agalactiae
  VARIANT 301: Xaa = Any Amino Acid
DIYIIPKGDCYELYMRIDDERRFIDVFEFNRMASLISHFKFVAGMNVGEKRRSQLGSCDYELSEGRLVSLRLSSVGDYRGQESLVIRILYSGHQDLKYWFDNIKQMKEVLGIRGLYLFSGPVGSGKTTLMYQLASEVFKNKQIITIEDPVEIKNDKMLQLQLNEDIGMTYDALIKLSLRHRPDILIIGEIRDQATARAVIRASLTGVMVFSTIHAKSIPGVYDRLIELGVNYQELENSLKLIAYQRLIGGGSLIDFETGNFKKHSSDKWNRQVDILAEEGHISKKQAQVRKNYPSRNNGKXSNF

SEQ ID NO: 172 - protein, 322 aa, Streptococcus agalactiae; identical to SEQ ID NO: 170

SEQ ID NO: 173 - protein, 322 aa, Streptococcus agalactiae
VQSLAKQVIHQAVEVNAQDIYIIPKGDCYELYMRIDDERRFIDVFEFNRMASLISHFKFVAGMNVGEKRRSQLGSCDYELSEGRLVSLRLSSVGDYRGQESLVIRILYSGHQDLKYWFDNIKQMKEVLGTRGLYLFSGPVGSGKTTLMYQLASEVFKNKQIITIEDPVEIKNDKMLQLQLNEDIGMTYDALIKLSLRHRPDILIIGEIRDQATARAVIRASLTGVMVFSTIHAKSISGVYDRLIELGVNYQELENSLKLIAYQRLIGGGSLIDFETGNFKKHSSDKWNRQVDILAEEGHISKKQAQVEKIIPQETTESSPTF

SEQ ID NO: 174 - protein, 322 aa, Streptococcus agalactiae; identical to SEQ ID NO: 173

SEQ ID NO: 175 - protein, 206 aa, Streptococcus agalactiae
SLAKQVIHQAVEVNAQDIYIIPKGDCYELYMRIDDERRFIDVFEFNRMASLISHFKFVAGMNVGEKRRSQLGSCDYELSEGRLVSLRLSSVGDYRGQESLVIRILYSGHQDLKYWFDNIKQMKEVLGIRGLYLFSGPVGSGKTTLMYQLASEVFKNKQIITIEDPVEIKNDKMLQLQLNEDIGMTYDALIKLSLRHRPDILIIGEK

SEQ ID NO: 176 - protein, 322 aa, Streptococcus agalactiae; identical to SEQ ID NO: 170

SEQ ID NO: 177 - protein, 297 aa, Streptococcus agalactiae
  VARIANT 98: Xaa = Any Amino Acid
TCYETLYAYLMMKRRFIDVFEFNRMASLISHFKFVAGMNVGEKRRSQLGSCDYELSEGRLVSLRLSSVGDYRGQESLVIRTLYSGHQDLKYWFDNIKXMKEVLCARGLYLFSGPVGSGKTTLMYQLASEVFKNKQIITIEDPVEIKNDKMLQLQLNEDIGMTYDALIKLSLRHRPDILIIGEIRDQATARAVIRASLTGVMVFSTIHAKSIPGVYDRLIELGVNYQELENSLKLIAYQRLIGGGSLIDFETSNFKKHSSDKWNRQVDILAEEGHISKKQAQVEKIIPQETTESSPTF

SEQ ID NO: 178 - protein, 310 aa, Streptococcus agalactiae
VEVNAQDIYIIPKGDCYEFYMRIDDERRFIDVFEFNRMASLISHFKFVAGMNVGEKRRSQLGSCDYELSEGRLVSLRLSSVGDYRGQESLVIRTLYSGHQDLKYWFDNIKQMKEVLCARGLYLFSGPVGSGKTTLMYQLASEVFKNKQIITIEDPVEIKNDKMLQLQLNEDIGMTYDALIKLSLRHRPDILIIGEIRDQATARAVIRASLTGVMVFSTIHAKSIPGVYDRLIELGVNYQELENSLKLIAYQRLIGGGSLIDFETSNFKKHSSDKWNRQVDILAEEGHISKKQAQVEKIIPQETTESSPTF

SEQ ID NO: 179 - protein, 97 aa, Streptococcus agalactiae
VIVMKFYMRIDDERRFIDVFEFNRMASLISHFKFVAGMNVGEKRRSQLGSCDYELSEGRLVSLRLSSVGDYRGQESLVIRTLYSGHQDLKYWFDNIK

SEQ ID NO: 180 - DNA, 753 bp, Streptococcus agalactiae
gtatcagttcaggcgtcagagaaagtagaacttaaagtagctacagattctgacacggcaccatttacttatcaaaaagacgggaaattcaaaggttatgatgttgatgttgtcaaagctgtttttaaaggtagtaagtacaaagtaaccttcaagacagttccttttgatactatttcaacaggtattgatgcagggaaatttgatttatcagctaatgatttttcatacaataaagaaagagcagaaaaatatctcttctcagaccctatatcccgttcaaattatgccgtagtagggaagaaggggagccattacaaatcattaagtgacctctctggaaaatcaacagaagttttatctggcgttaactatgcacaggttctagaaaattggaataaaaatcatcctaataaaaaaccaataaaaatcaaatatgtttctgggacaactggtgttactagcagattaaaaaatattgagagtgggaaaattgactttatcctatatgatgccatttcatctgactatattgtaaaagatcaatcattaaacttaagcgtttctcctttgaaaggtaaaattggtaataataaggatggattagaatacctccttttaccaaaagataaaaaaggtaaaactctacagaaatttataaataagcgtattaaagttttgaaagaagatggtactttggcacgtttaagtaaacaatatttcggtggagattacgtttcaaacattgataaa

SEQ ID NO: 181 - DNA, 753 bp, Streptococcus agalactiae
gtatcagttcaggcgtcagagaaagtagaacttaaagtagctacagattctgacacggcaccatttacttatraaaaagacgggaaattcaaaggttatgatgttgatgttgtcaaagctgtttttaaaggtagtaagtacaaagtaaccttcaagacagttccttttgatactatttcaacaggtattgatgcagggaaatttgatttatcagctaatgatttttcatacaataaagaaagagcagaaaaatatctcttctcagatcctatatcccgttcaaattatgccgtagtagggaagaaggggagccattacaaatcattaagtgacctctctggaaaatcaaccgaagttttatctggcgttaactatgcacaggttctagaaaattggaataaaaatcatcctaataaaaaaccaataaaaatcaaatatgtttctgggacaactggtgttactagcagattaaaaaatattgagagtgggaaaattgactttatcctatatgatgccatttcatccgactatattgtaaaagaccaatcattaaacttaagcgtttctcctttgaaaggtaaaattggtaataataaggatggactagaatacctccttttaccaaaagataaaaaaggtaaaactctacagaaatttataaataagcgtattaaagttttgaaagaaaatggtactttggcacgtttaagtaaacaatatttcggtggagattacgtttcaaacattgataaa

SEQ ID NO: 182 - DNA, 551 bp, Streptococcus agalactiae
attcaaaggttatgatgttgatgttgtcaaagctgtttttaaaggtagtaagtacaaagtaaccttcaagacagttccttttgatactatttcaacaggtattgatgcagggaaatttgatttatcagctaatgatttttcatacaataaagaaagagcagaaaaatatctcttctcagatcctatatcccgttcaaattatgccgtagtagggaagaaggggagccattacaaatcattaagtgacctctctggaaaatcaaccgaagttttatctggcgttaactatgcacaggttctagaaaattggaataaaaatcatcctaataaaaaaccaataaaaatcaaatatgtttctgggacaactggtgttactagcagattaaaaaatattgagagtgggaaaattgactttatcctatatgatgccatttcatccgactatattgtaaaagaccaatcattaaacttaagcgtttctcctttgaaaggtaaaattggtaataataaggatggactagaatacctccttttaccaaaagataaaaaag

SEQ ID NO: 183 - DNA, 753 bp, Streptococcus agalactiae
gtatcagttcaggcgtcagagaaagtagaacttaaagtagctacagattctgacacggcaccatttacttatcaaaaagacgggaaattcaaaggttatgatgttgatgttgtcaaagctgtttttaaaggtagtaagtacaaagtaaccttcaagacagttccttttgatactatttcaacaggtattgatgcagggaaatttgatttatcagctaatgatttttcatacaataaagaaagagcagaaaaatatctcttctcagatcctatatcccgttcaaattatgccgtagtagggaagaaggggagccattacaaatcattaagtgacctctctggaaaatcaaccgaagttttatctggcgttaactatgcacaggttctagaaaattggaataaaaatcatcctaataaaaaaccaataaaaatcaaatatgtttctgggacaactggtgttactagcagattaaaaaatattgagagtgggaaaattgactttatcctatatgatgccatttcatccgactatattgtaaaagaccaatcattaaacttaagcgtttctcctttgaaaggtaaaattggtaataataaggatggactagaatacctccttttaccaaaagataaaaaaggtaaaactctacagaaatttataaataagcgtattaaagttttgaaagaaaatggtactttggcacgtttaagtaaacaatatttcggtggagattacgtttcaaacattgataaa

SEQ ID NO: 184 - DNA, 669 bp, Streptococcus agalactiae
  misc_feature 409, 410, 424, 432: n = A,T,C or G
gtatcagttcaggcgtcagagaaagtagaacttaaagtagctacagattctgacacggcaccatttacttatcaaaaagacgggaaattcaaaggttatgatgttgatgttgtcaaagctgtttttaaaggtagtaagtacaaagtaaccttcaagacagttccttttgatactatttcaacaggtattgatgcagggaaatttgatttatcagctaatgatttttcatacaataaagaaagagcagaaaaatatctcttctcagatcctatatcccgttcaaattatgccgtagtagggaagaaggggagccattacaaatcattaagtgacctctctggaaaatcaaccgaagttttatctggcgttaactatgcacaggttctagaaaattggaataaaaatcatnntaataaaaaaccantaaaaatnaaatatgtttctgggacaactggtgttactagcagattaaaaaatattgagagtgggaaaattgactttatcctatatgatgccatttcatccgactatattgtaaaagaccaatcattaaacttaagcgtttctcctttgaaaggtaaaattggtaataataaggatggactagaatacctccttttaccaaaagataaaaaaggtaaaactctacagaaatttataaataagcgt

SEQ ID NO: 185 - DNA, 753 bp, Streptococcus agalactiae; identical to SEQ ID NO: 183

SEQ ID NO: 186 - DNA, 753 bp, Streptococcus agalactiae
gtatcagttcaggcgtcagagaaagtagaacttaaagtagctacagattctgacacggcaccatttacttatcaaaaagacgggaaattcaaaggttatgacgttgatgttgtcaaagctgtttttaaaggtagtaagtacaaagtaaccttcaagacagttccttttgatactatttcaacaggtattgatgcagggaaatttgatttatcagctaatgatttttcatataataaagaaagagcagaaaaatatctcttctcagatcctatatcccgttcaaattatgccgtagtagggaagaaggggagccattacaaatcattaagtgacctctctggaaaatcaacagaagttttatctggcgttaactatgcacaggttctagaaaattggaataaaaatcatcctaataaaaaaccaataaaaatcaaatatgtttctgggacaactggtgttactagcagattaaaaaatattgagagtggaaaaattgactttatcctatatgatgccatttcatctgactatattgtaaaagatcaatcattaaacttaagcgtttctcctttgaaaggtaaaattggtaataataaggatggattagaatacctccttttaccaaaagataaaaaaggtaaaactctacagaaatttataaataagcgtattaaagttttgaaagaagatggtactttggcacgtttaagtaaacaatatttcggtggagattacgtttcaaacattgataaa

SEQ ID NO: 187 - DNA, 753 bp, Streptococcus agalactiae; identical to SEQ ID NO: 183

SEQ ID NO: 188 - DNA, 694 bp, Streptococcus agalactiae
gtatcagttcaggcgtcagagaaagtagaacttaaagtagctacagattctgacacggcaccatttacttatcaaaaagacgggaaattcaaaggttatgatgttgatgttgtcaaagctgtttttaaaggtagtaagtacaaagtaaccttcaagacagttccttttgatactatttcaacaggtattgatgcagggaaatttgatttatcagctaatgatttttcatacaataaagaaagagcagaaaaatatctcttctcagatcctatatcccgttcaaattatgccgtagtagggaagaaggggagccattacaaatcattaagtgacctctctggaaaatcaaccgaagttttatctggcgttaactatgcacaggttctagaaaattggaataaaaatcatcctaataaaaaaccaataaaaatcaaatatgtttctgggacaactggtgttactagcagattaaaaaatattgagagtgggaaaattgactttatcctatatgatgccatttcatccgactatattgtaaaagaccaatcattaaacttaagcgtttctcctttgaaaggtaaaattggtaataataaggatggactagaatacctccttttaccaaaagataaaaaaggtaaaactctacagaaatttataaataagcgtaataaagttttgaaagaaaatggta

SEQ ID NO: 189 - DNA, 753 bp, Streptococcus agalactiae; identical to SEQ ID NO: 186

SEQ ID NO: 190 - DNA, 753 bp, Streptococcus agalactiae; identical to SEQ ID NO: 186

SEQ ID NO: 191 - protein, 251 aa, Streptococcus agalactiae
VSVQASEKVELKVATDSDTAPFTYQKDGKFKGYDVDVVKAVFKGSKYKVTFKTVPFDTISTGIDAGKFDLSANDFSYNKERAEKYLFSDPISRSNYAVVGKKGSHYKSLSDLSGKSTEVLSGVNYAQVLENWNKNHPNKKPIKIKYVSGTTGVTSRLKNIESGKIDFILYDAISSDYIVKDQSLNLSVSPLKGKIGNNKDGLEYLLLPKDKKGKTLQKFINKRIKVLKEDGTLARLSKQYFGGDYVSNIDK

SEQ ID NO: 192 - protein, 251 aa, Streptococcus agalactiae
  VARIANT 25: Xaa = Any Amino Acid
VSVQASEKVELKVATDSDTAPFTYXKDGKFKGYDVDVVKAVFKGSKYKVTFKTVPFDTISTGIDAGKFDLSANDFSYNKERAEKYLFSDPISRSNYAVVGKKGSHYKSLSDLSGKSTEVLSGVNYAQVLENWNKNHPNKKPIKIKYVSGTTGVTSRLKNIESGKIDFILYDAISSDYIVKDQSLNLSVSPLKGKIGNNKDGLEYLLLPKDKKGKTLQKFINKRIKVLKENGTLARLSKQYFGGDYVSNIDK

SEQ ID NO: 193 - protein, 183 aa, Streptococcus agalactiae
FKGYDVDVVKAVFKGSKYKVTFKTVPFDTISTGIDAGKFDLSANDFSYNKERAEKYLFSDPISRSNYAVVGKKGSHYKSLSDLSGKSTEVLSGVNYAQVLENWNKNHPNKKPIKIKYVSGTTGVTSRLKNIESGKIDFILYDAISSDYIVKDQSLNLSVSPLKGKIGNNKDGLEYLLLPKDKK

SEQ ID NO: 194 - protein, 251 aa, Streptococcus agalactiae
VSVQASEKVELKVATDSDTAPFTYQKDGKFKGYDVDVVKAVFKGSKYKVTFKTVPFDTISTGIDAGKFDLSANDFSYNKERAEKYLFSDPISRSNYAVVGKKGSHYKSLSDLSGKSTEVLSGVNYAQVLENWNKNHPNKKPIKIKYVSGTTGVTSRLKNIESGKIDFILYDAISSDYIVKDQSLNLSVSPLKGKIGNNKDGLEYLLLPKDKKGKTLQKFINKRIKVLKENGTLARLSKQYFGGDYVSNIDK

SEQ ID NO: 195 - protein, 223 aa, Streptococcus agalactiae
  VARIANT 137, 142, 144: Xaa = Any Amino Acid
VSVQASEKVELKVATDSDTAPFTYQKDGKFKGYDVDVVKAVFKGSKYKVTFKTVPFDTISTGIDAGKFDLSANDFSYNKERAEKYLFSDPISRSNYAVVGKKGSHYKSLSDLSGKSTEVLSGVNYAQVLENWNKNHXNKKPXKXKYVSGTTGVTSRLKNIESGKIDFILYDAISSDYIVKDQSLNLSVSPLKGKIGNNKDGLEYLLLPKDKKGKTLQKFINKR

SEQ ID NO: 196 - protein, 251 aa, Streptococcus agalactiae; identical to SEQ ID NO: 194

SEQ ID NO: 197 - protein, 251 aa, Streptococcus agalactiae; identical to SEQ ID NO: 191

SEQ ID NO: 198 - protein, 251 aa, Streptococcus agalactiae; identical to SEQ ID NO: 194

SEQ ID NO: 199 - protein, 231 aa, Streptococcus agalactiae
VSVQASEKVELKVATDSDTAPFTYQKDGKFKGYDVDVVKAVFKGSKYKVTFKTVPFDTISTGIDAGKFDLSANDFSYNKERAEKYLFSDPISRSNYAVVGKKGSHYKSLSDLSGKSTEVLSGVNYAQVLENWNKNHPNKKPIKIKYVSGTTGVTSRLKNIESGKIDFILYDAISSDYIVKDQSLNLSVSPLKGKIGNNKDGLEYLLLPKDKKGKTLQKFINKRNKVLKENG

SEQ ID NO: 200 - protein, 251 aa, Streptococcus agalactiae; identical to SEQ ID NO: 191

SEQ ID NO: 201 - protein, 251 aa, Streptococcus agalactiae; identical to SEQ ID NO: 191

SEQ ID NO: 202 - DNA, 1179 bp, Streptococcus agalactiae
tataatttttcgactaatgaattgtctaagacttttaaagattttaagctagctaaatcaaaaagtcatgctattgaagaaacaaagccgttttcaatactattaatgggggtggacacaggttcagagcatcgaaaatctaagtggtcaggaaatagcgattctatgatcttagtcactataaatcctaaaactaataaaacaacgatgacaagcttagaacgtgacgtattgattaaattgagtggtcccaaaaataatggacagactggagtagaagcaaagctaaatgcagcctatgcttctggtggtgcggaaatggcattgatgactgttcaagacttattagatattaatgttgattactttatgcaaattaatatgcaaggattagttgatttagtcaatgctgttggtggtataacagtaactaataaatttgactttccaatatcaattgctgccaatgaaccagagtacaaggctgttgttgaaccagggacacataaaataaatggagaacaagcacttgtttattctcgtatgcgctatgatgatccagagggagattatgggcgtcaaaaaagacaacgtgaagtaattcaaaaagtccttaaaaaaatattggcgttaaatagtattagttcatacaaaaaaattctttccgcagtaagtaataacatgcaaactaatattgagatatcatcaaaaacgattcctaatttgttagcttataaagattcattggaacatattaaatcttatcagttgaagggtgaagacgctactttatcagatggtggctcttatcaaattttaactaagaaacatctacttgcagttcaaaatagaattaagaaagaactggataaaaagcgtagtaaaactctgaagacaagcgcgattctatatgaagattactatggtactactgctagtaatgattcttctacttattcatcaacacaagagaataattataatacaacaccttattcagaagcaccaccaagttacagtggtaatactacttatagttctgagactaatcaaacaactcatcaaaattactataatagtagcactcctgctagtaactatagcagtaacactaacacaggtcaggctgattcaagtggaagtgtcaataatcataacggggctgcaacgcctaatcca

SEQ ID NO: 203 - DNA, 1180 bp, Streptococcus agalactiae
tataatttttcgactaatgaattgtctaagacttttaaagattttaagctagctaaatcaaaaagtcatgctattgaagaaacaaagccgttttcaatactattaatgggggtggacacaggttcagagcatcgaaaatctaagttggtcaggaaatagcgattctatgatcttagtcactataaatcctaaaactaataaaacaacgatgacaagcttagaacgtgacgtattgattaaattgagtggtcccaaaaataatggacagactggcgtagaagcaaagctaaatgcagcctatgcttctggtggtgcggaaatggcattgatgactgttcaagacttattagatattaatgttgattactttatgcaaattaatatgcaaggattagttgatttagtcaatgctgttggtggtataacagtaactaataaatttgactttccaatatcaattgctgccaatgaaccagagtacaaggctgttgttgaaccagggacacataaaataaatggagaacaagcacttgtttattctcgtatgcgctatgatgatccagagggagattatgggcgtcaaaaaagacaacgtgaagtaattcaaaaagtccttaaaaaaatattggcgttaaatagtattagttcatacaaaaaaattctttccgcagtaagtaataacatgcaaactaatattgagatatcatcaaaaacgattcctaatttgttagcttataaagattcattggaacatattaaatcttatcagttgaaaggtgaagacgctactttatcagatggtggctcttatcaaattttaactaagaaacatctacttgcagttcaaaatagaattaagaaagaactagataaaaagcgtagtaaaactctgaagacaagcgcgattctatatgaagattactatggtactactgctagtaatgattcttctacttattcatcaacacaagagaataattataatacaacaccttattcagaagcaccaccaagttacagtggtaatactacttatagttctgagactaatcaaacaactcatcaaagttactataatagtagcactcctgctaataactatagcagtaacactaacacaggtcaggctgattcaagtggaagtgtcaataatcataatggggctgcaacgcctaatcca

SEQ ID NO: 204 - DNA, 1179 bp, Streptococcus agalactiae; identical to SEQ ID NO: 202

SEQ ID NO: 205 - DNA, 1179 bp, Streptococcus agalactiae; identical to SEQ ID NO: 202

SEQ ID NO: 206 - DNA, 1179 bp, Streptococcus agalactiae; identical to SEQ ID NO: 202

SEQ ID NO: 207 - DNA, 1180 bp, Streptococcus agalactiae
tataatttttcgactaatgaattgtctaagacttttaaagattttaagctagctaaatcaaaaagtcatgctattgaagaaacaaagccgttttcaatactattaatgggggtggacacaggttcagagcatcgaaaatctaagtggtcaggaaatagcgattctatgatcttagtcactataaatcctaaaactaataaaacaacgatgacaagcttagaacgtgacgtattgattaaattgagtggtcccaaaaataatggacagactggagtagaagcaaagctaaatgcagcctatgcttctggtggtgcggaaatggcattgatgactgttcaagacttattagatattaatgttgattactttatgcaaattaatatgcaaggattagttgatttagtcaatgctgttggtggtataacagtaactaataaatttgactttccaatatcaattgctgccaatgaaccagagtacaaggctgttgttgaaccagggacacataaaataaatggagaacaagcacttgtttattctcgtatgcgctatgatgatccagagggagattatgggcgtcaaaaaagacaacgtgaagtaattcaaaaagtccttaaaaaaatattggcgttaaatagtattagttcatacaaaaaaattctttccgcagtaagtaataacatgcaaactaatattgagatatcatcaaaaacgattcctaatttgttagcttataaagattcattggaacatattaaatcttatcagttgaagggtgaagacgctactttatcagatggtggctcttatcaaattttaactaagaaacatctacttgcagttcaaaatagaattaagaaagaactggataaaaagcgtagtaaaactctgaagacaagcgcgattctatatgaagattactatggtactactgctagtaatgattcttctacttattcatcaacacaagagaataattataatacaacaccttattcagaagcaccaccaagttacagtggtaatactacttattagttctgagactaatcaaacaactcatcaaaattactataatagtagcactcctgctagtaactatagcagtaacactaacacaggtcaggctgattcaagtggaagtgtcaataatcataacggggctgcaacgcctaatcca

SEQ ID NO: 208 - DNA, 1180 bp, Streptococcus agalactiae
gattttaagctagataaatcaaaaagtcatgctattgaagaaacaaagccgttttcaatactattaatgggtgtggacacaggttcagagcatcgaaaatctaagtggtcaggaaatagcgattctatgatcttagtcactataaatcctaaaactaataaaacaacgatgacaagcttagaacgtgacgtattgattaaattgagtggtcccaaaaataatggacagactggcgtagaagcaaagctaaatgcagcctatgcttctggtggtgcggaaatggcattgatgactgttcaagacttattagatattaatgttgattactttatgcaaattaatatgcaaggattagttgatttggtcaatgctgttggtggtataacagtaactaataaatttgactttccaatatcaattgctgccaatgaaccagagtacaaggctgttgttgaaccagggacacataaaataaatggagaacaagcacttgtttattctcgtatgcgctatgatgatccagagggagattatgggcgtcaaaaaagacaacgtgaagtaattcaaaaagtccttaaaaaaatattggcgttaaatagtattagttcatacaaaaaaattctttccgcagtaagtaataacatgcaaactaatattgagatatcatcaaaaacgattcctaatttgttagcttataaagattcattggaacatattaaatcttatcagttgaagggtgaagacgctactctatcagatggtggctcttatcaaattttaactaagaaacatctacttgcagttcaaaatagaattaagaaagagctggataaaaagcgtagtaaaactctgaagacaagcgcgattctatatgaagattactatggtactactgctagtaatgattcttctacttattcatcaacacaagagaattattattatacaacacccttattcagaagcaccaccaagttacagtggtaatactacttatagttctgagactaatcaaacaactcatcaaagttactataatagtagcactcctgctagtaactatagcagtaacactaacacaggtcaggctgattcaagtggaagtgttaataattataacggggctgcaacgcctaatccaaacacaggaacgcaaccagtaccaggtcaaactaatcca

SEQ ID NO: 209 - DNA, 640 bp, Streptococcus agalactiae
tataatttttcgactaatgaattgtctaagacttttaaagattttaagctagctaaatcaaaaagtcatgctattgaagaaacaaagccgttttcaatactattaatgggggtggacacaggttcagagcatcgaaaatctaagtggtcaggaaatagcgattctatgatcttagtcactataaatcctaaaactaataaaacaacgatgacaagcttagaacgtgacgtattgattaaattgagtggtcccaaaaataatggacagactggagtagaagcaaagctaaatgcagcctatgcttctggtggtgcggaaatggcattgatgactgttcaagacttattagatattaatgttgattactttatgcaaattaatatgcaaggattagttgatttagtcaatgctgttggtggtataacagtaactaataaatttgactttccaatatcaattgctgccaatgaaccagagtacaaggctgttgttgaaccagggacacataaaataaatggagaacaagcacttgtttattctcgtatgcgctatgatgatccagagggagattatgggcgtcaaaaaagacaacgtgaagtaattcaaaaagtccttaaaaaaatattggcgttaaatagta

SEQ ID NO: 210 - DNA, 539 bp, Streptococcus agalactiae
ttagttcatacaaaaaaattctttccgcagtaagtaataacatgcaaactaatattgagatatcatcaaaaacgattcctaatttgttagcttataaagattcattggaacatattaaatcttatcagttgaagggtgaagacgctactttatcagatggtggctcttatcaaattttaactaagaaacatctacttgcagttcaaaatagaattaagaaagaactggataaaaagcgtagtaaaactctgaagacaagcgcgattctatatgaagattactatggtactactgctagtaatgattcttctacttattcatcaacacaagagaataattataatacaacaccttattcagaagcaccaccaagttacagtggtaatactacttatagttctgagactaatcaaacaactcatcaaaattactataatagtagcactcctgctagtaactatagcagtaacactaacacaggtcaggctgattcaagtggaagtgtcaataatcataacggggctgcaacgcctaatcca

SEQ ID NO: 211 - DNA, 1179 bp, Streptococcus agalactiae; identical to SEQ ID NO: 202

SEQ ID NO: 212 - DNA, 1126 bp, Streptococcus agalactiae
ttcaatactattaatgggtgtggacacaggttcagagcatcgaaaatctaagtggtcaggaaatagcgattctatgatcttagtcactataaatcctaaaactaataaaacaacgatgacaagcttagaacgtgacgtattgattaaattgagtggtcccaaaaataatggacagactggcgtagaagcaaagctaaatgcagcctatgcttctggtggtgcggaaatggcattgatgactgttcaagacttattagatattaatgttgattactttatgcaaattaatatgcaaggattagttgatttggtcaatgctgttggtggtataacagtaactaataaatttgactttccaatatcaattgctgccaatgaaccagagtacaaggctgttgttgaaccagggacacataaaataaatggagaacaagcacttgtttattctcgtatgcgctatgatgatccagagggagattatgggcgtcaaaaaagacaacgtgaagtaattcaaaaagtccttaaaaaaatattggcgttaaatagtattagttcatacaaaaaaattctttccgcagtaagtaataacatgcaaactaatattgagatatcatcaaaaacgattcctaatttgttagcttataaagattcattggaacatattaaatcttatcagttgaagggtgaagacgctactctatcagatggtggctcttatcaaattttaactaagaaacatctacttgcagttcaaaatagaattaagaaagagctggataaaaagcgtagtaaaactctgaagacaagcgcgattctatatgaagattactatggtactactgctagtaatgattcttctacttattcatcaacacaagagaataattataatacaacaccttattcagaagcaccaccaagttacagtggtaatactacttatagttctgagactaatcaaacaactcatcaaagttactataatagtagcactcctgctagtaactatagcagtaacactaacacaggtcaggctgattcaagtggaagtgttaataattataacggggctgcaacgcctaatccaaacacaggaacgcaaccagtaccaggtcaaactaatcca

SEQ ID NO: 213 - protein, 393 aa, Streptococcus agalactiae
YNFSTNELSKTFKDFKLAKSKSHAIEETKPFSILLMGVDTGSEHRKSKWSGNSDSMILVTINPKTNKTTMTSLERDVLIKLSGPKNNGQTGVEAKLNAAYASGGAEMALMTVQDLLDINVDYFMQINMQGLVDLVNAVGGITVTNKFDFPISIAANEPEYKAVVEPGTHKINGEQALVYSRMRYDDPEGDYGRQKRQREVIQKVLKKILALNSISSYKKILSAVSNNMQTNIEISSKTIPNLLAYKDSLEHIKSYQLKGEDATLSDGGSYQILTKKHLLAVQNRIKKELDKKRSKTLKTSAILYEDYYGTTASNDSSTYSSTQENNYNTTPYSEAPPSYSGNTTYSSETNQTTHQNYYNSSTPASNYSSNTNTGQADSSGSVNNHNGAATPNP

SEQ ID NO: 214 - protein, 393 aa, Streptococcus agalactiae
  VARIANT 53, 64, 66, 67, 76, 80, 87, 119, 121, 127, 133, 145, 146,148, 157, 165, 170, 185, 186, 199, 206, 213, 215, 226, 227,231, 233, 241, 246, 253, 260, 275, 284, 286, 291, 294, 295,305, 313, 314, 315, 326, 328, 342, 346, 348, 350, 359: Xaa = Any Amino Acid
  VARIANT 360, 361, 365, 366, 368, 370, 372, 377, 384, 386, 392: Xaa = Any Amino Acid
YNFSTNELSKTFKDFKLAKSKSHAIEETKPFSILLMGVDTGSEHRKSKLVRKXRFYDLSHYKSXNXXNNDDKLRTXRIDXIEWSQKXWTDWRRSKAKCSLCFWWCGNGIDDCSRLIRYXCXLLYANXYARISXFSQCCWWYNSNXXIXLSNINCCQXTRVQGCCXTRDTXNKWRTSTCLFSYALXXSRGRLWASKKTTXSNSKSPXKNIGVKXYXFIQKNSFRSKXXHANXYXDIIKNDSXFVSLXRFIGTYXILSVERXRRYFIRWWLLSNFNXETSTCSSKXNXERTRXKAXXNSEDKRDSIXRLLWYYCXXXFFYLFINTREXLXYNTLFRSTTKLQWXYYLXFXDXSNNSSKLLXXXHSCXXLXQXHXHRSGXFKWKCQXSXWGCNAXS

SEQ ID NO: 215 - protein, 393 aa, Streptococcus agalactiae; identical to SEQ ID NO: 213

SEQ ID NO: 216 - protein, 393 aa, Streptococcus agalactiae; identical to SEQ ID NO: 213

SEQ ID NO: 217 - protein, 393 aa, Streptococcus agalactiae; identical to SEQ ID NO: 213

SEQ ID NO: 218 - protein, 360 aa, Streptococcus agalactiae
  VARIANT 346, 348, 350, 359, 360: Xaa = Any Amino Acid
YNFSTNELSKTFKDFKLAKSKSHAIEETKPFSILLMGVDTGSEHRKSKWSGNSDSMILVTINPKTNKTTMTSLERDVLIKLSGPKNNGQTGVEAKLNAAYASGGAEMALMTVQDLLDINVDYFMQINMQGLVDLVNAVGGITVTNKFDFPISIAANEPEYKAVVEPGTHKINGEQALVYSRMRYDDPEGDYGRQKRQREVIQKVLKKILALNSISSYKKILSAVSNNMQTNIEISSKTIPNLLAYKDSLEHIKSYQLKGEDATLSDGGSYQILTKKHLLAVQNRIKKELDKKRSKTLKTSAILYEDYYGTTASNDSSTYSSTQENNYNTTPYSEAPPSYSGNTTYXFXDXSNNSSKLLXX

SEQ ID NO: 219 - protein, 393 aa, Streptococcus agalactiae
  VARIANT 329, 333, 335, 337, 346, 347, 348, 352, 353, 355, 357, 359,364, 370, 371, 373, 379, 392: Xaa = Any Amino Acid
DFKLDKSKSHAIEETKPFSILLMGVDTGSEHRKSKWSGNSDSMILVTINPKTNKTTMTSLERDVLIKLSGPKNNGQTGVEAKLNAAYASGGAEMALMTVQDLLDINVDYFMQINMQGLVDLVNAVGGITVTNKFDFPISIAANEPEYKAVVEPGTHKINGEQALVYSRMRYDDPEGDYGRQKRQREVIQKVLKKILALNSISSYKKILSAVSNNMQTNIEISSKTIPNLLAYKDSLEHIKSYQLKGEDATLSDGGSYQILTKKHLLAVQNRIKKELDKKRSKTLKTSAILYEDYYGTTASNDSSTYSSTQENYYYTTPLFRSTTKLQWXYYLXFXDXSNNSSKLLXXXHSCXXLXQXHXHRSGXFKWKCXXLXRGCNAXSKHRNATSTRSNXS

SEQ ID NO: 220 - protein, 393 aa, Streptococcus agalactiae; identical to SEQ ID NO: 213

SEQ ID NO: 221 - protein, 393 aa, Streptococcus agalactiae; identical to SEQ ID NO: 213

SEQ ID NO: 222 - protein, 375 aa, Streptococcus agalactiae
SILLMGVDTGSEHRKSKWSGNSDSMILVTINPKTNKTTMTSLERDVLIKLSGPKNNGQTGVEAKLNAAYASGGAEMALMTVQDLLDINVDYFMQINMQGLVDLVNAVGGITVTNKFDFPISIAANEPEYKAVVEPGTHKINGEQALVYSRMRYDDPEGDYGRQKRQREVIQKVLKKILALNSISSYKKILSAVSNNMQTNIEISSKTIPNLLAYKDSLEHIKSYQLKGEDATLSDGGSYQILTKKHLLAVQNRIKKELDKKRSKTLKTSAILYEDYYGTTASNDSSTYSSTQENNYNTTPYSEAPPSYSGNTTYSSETNQTTHQSYYNSSTPASNYSSNTNTGQADSSGSVNNYNGAATPNPNTGTQPVPGQTNP

SEQ ID NO: 223 - DNA, 824 bp, Streptococcus agalactiae
gggcacaagtttgtacaaaaaagcaggctctattttttccttgatcattccaaaatcaaatcctaaattaacaaaaaaagacttcctaacaaagaaagttatcccacttaactatgttgctcttggagattctctgaccgaaggtgtgggcgatacaacctctcaaggtggttttgtcccactgctatcagaatcactccataatcgatactcttaccaagtgacttctgttaattatggtgtgtctgggaatactagtcaacaaattttaaaacgtatgacgacagatcctcaaatcgaaaaagatttagagaaagctgatttattgacgctaactgttggtggtaatgatgtcttggctgttattcgtaaagagctcagtcatttatcactaaattcctttgagaaaccagcagaagcatataaggaacgtttgaaagaaatacttgcaaaagcaagacaagataatcctaaattgcctatttatgttttaggcatttataatcctttttacctaaactttccacaattaactaaaatgcaaaccgttattgataattggaataaagctacaaaagaagtagttgatgcttcagaaaatgtttattttgtcccaattaatgaccgcctttataagggaataaatggtaaagagggtattacagagtcatcaaatagtcaggcaagtatcactaatgatgctctctttactggagaccattttcatcccaataatattggctatcaaatcatgtctaacgccgttatggagaaaataaatgaaacaagaaaaaactggccgaacccagctttcttgtacaaag

SEQ ID NO: 224 - DNA, 821 bp, Streptococcus agalactiae
tttgtacaaaaaagcaggctctattttttccttgatcattccaaaatcaaatcctaaattaacaaaaaaagacttcctaacaaagaaagttatcccacttaactatgttgctcttggagattctctgaccgaaggtgtgggcgatacaacctctcaaggtggttttgttccactgctatcagaatcactccataatcgatactcttaccaagtgacttctgttaattatggtgtgtctgggaatactagtcaacaaattttaaaacgtatgacgacagatcctcaaatcgaaaaagatttagagaaagctgatttattgacgctaactgttggtggtaatgatgtcttggctgttattcgtaaagagctcagtcatttatcactaaattcctttgagaaaccagcagaagcatataaggaacgtttgaaagaaatccttgcaaaagcaagacaagataatcctaaattgcctatttatgttttaggcatttataatcctttttacctaaactttccacaattaactaaaatgcaaaccgttattgataattggaataaagctacaaaagaagtagttgatgcttcagaaaatgtttattttgtcccaattaatgaccgcctttataagggaataaatggtaaagagggtattatagagtcatcaaatagtcaggcaagtatcactaatgatgctctctttactggagaccattttcatcccaataatattggctatcaaatcatgtctaacgccgttatggagaaaataaatgaaacaagaaaaaactggccgaacccagctttcttgtacaaagtggtcc

SEQ ID NO: 225 - DNA, 814 bp, Streptococcus agalactiae
gtttgtacaaaaaagcaggctctattttttccttgatcattccaaaatcaaatcctaaattaacaaaaaaagacttcctaacaaagaaagttatcccacttaactatgttgctcttggagattctctgaccgaaggtgtgggcgatacaacctctcaaggtggttttgttccactgctatcagaatcactccataatcgatactcttaccaagtgacttctgttaattatggtgtgtctgggaatactagtcaacaaattttaaaacgtatgacgacagatcctcaaatcgaaaaagatttagagaaagctgatttattgacgctaactgttggtggtaatgatgtcttggctgttattcgtaaagagctcagtcatttatcactaaattcctttgagaaaccagcagaagcatataaggaacgtttgaaagaaatccttgcaaaagcaagacaagataatcctaaattgcctatttatgttttaggcatttataatcctttttacctaaactttccacaattaactaaaatgcaaaccgttattgataattggaataaagctacaaaagaagtagttgatgcttcagaaaatgtttattttgtcccaattaatgaccgcctttataagggaataaatggtaaagagggtattacagagtcatcaaatagtcaggcaagtatcactaatgatgctctctttactggagaccattttcatcccaataatattggctatcaaatcatgtctaacgccgttatggagaaaataaatgaaacaagaaaaaactggccgaacccagctttcttgtacaa

SEQ ID NO: 226 - DNA, 821 bp, Streptococcus agalactiae
ggacaagtttgtacaaaaaagcaggctctattttttccttgatcattccaaaatcaaatcctaaattaacaaaaaaagacttcctaacaaagaaagttatcccacttaactatgttgctcttggagattctctgaccgaaggtgtgggggatacaacctctcaaggtggttttgtcccactgctatcagaatcactccataatcgatactcttaccaagtgacttctgttaattatggtgtgtctgggaatactagtcaacaaattttaaaacgtatgacgacagatcctcaaatcgaaaaagatttagagaaagctgatttattgacgctaactgttggtggtaatgatgtcttggctgttattcgtaaagagctcagtcatttatcactaaattcctttgagaaaccagcagaagcatataaggaacgtttgaaagaaattcttgcaaaagcaagacaagataatcctaaattgcctatttatgttttaggcatttataatcctttttacctaaactttccacaattaactaaaatgcaaaccgttattgataattggaataaagctacaaaagaagtagttgatgcttcagaaaatgtttattttgtcccaattaatgaccgcctttataagggaataaatggtaaagagggtattacagagtcatcaaatagtcaggcaagtatcactaatgatgctctctttactggagaccattttcatcccaataatattggctatcaaatcatgtctaacgccgttatggagaaaataaatgaaacaagaaaaaactggccgaacccagctttcttgtacaaa

SEQ ID NO: 227 - DNA, 814 bp, Streptococcus agalactiae
gtttgtacaaaaaagcaggctctattttttccttgatcattccaaaatcaaatcctaaattaacaaaaaaagacttcctaacaaagaaagttatcccacttaactatgttgctcttggagattctctgaccgaaggtgtgggcgatacaacctctcaaggtggttttgtcccactgctatcagaatcactccataatcgatactcttaccaagtgacttctgttaattatggtgtgtctgggaatactagtcaacaaattttaaaacgtatgacgacagatcctcaaatcgaaaaagatttagagaaagctgatttattgacgctaactgttggtggtaatgatgtcttggctgttattcgtaaagagctcagtcatttatcactaaattcctttgagaaaccagcagaagcatataaggaacgtttgaaagaaatacttgcaaaagcaagacaagataatcctaaattgcctatttatgttttaggcatttataatcctttttacctaaactttccacaattaactaaaatgcaaaccgttattgataattggaataaagctacaaaagaagtagttgatgcttcagaaaatgtttattttgtcccaattaatgaccgcctttataagggaataaatggtaaagagggtattacagagtcatcaaatagtcaggcaagtatcactaatgatgctctctttactggagaccattttcatcccaataatattggctatcaaatcatgtctaacgccgttatggagaaaataaatgaaacaagaaaaaactggccgaacccagctttcttgtacaa

SEQ ID NO: 228 - DNA, 815 bp, Streptococcus agalactiae
gtttgtacaaaaaagcaggctctattttttccttgatcattccaaaatcaaatcctaaattaacaaaaaaagacttcctaacaaagaaagttatcccacttaactatgttgctcttggagattctctgaccgaaggtgtgggggatacaacctctcaaggtggttttgtcccactgctatcagaatcactccataatcgatactcttaccaagtgacttctgttaattatggtgtgtctgggaatactagtcaacaaattttaaaacgtatgacgacagatcctcaaatcgaaaaagatttagagaaagctgatttattgacgctaactgttggtggtaatgatgtcttggctgttattcgtaaagagctcagtcatttatcactaaattcctttgagaaaccagcagaagcatataaggaacgtttgaaagaaattcttgcaaaagcaagacaagataatcctaaattgcctatttatgttttaggcatttataatcctttttacctaaactttccacaattaactaaaatgcaaaccgttattgataattggaataaagctacaaaagaagtagttgatgcttcagaaaatgtttattttgtcccaattaatgaccgcctttataagggaataaatggtaaagagggtattacagagtcatcaaatagtcaggcaagtatcactaatgatgctctctttactggagaccattttcatcccaataatattggctatcaaatcatgtctaacgccgttatggagaaaataaatgaaacaagaaaaaactggccgaacccagctttcttgtacaaa

SEQ ID NO: 229 - DNA, 815 bp, Streptococcus agalactiae
gtttgtacaaaaaagcaggctctattttttccttgatcattccaaaatcaaatcctaaattaacaaaaaaagacttcctaacaaagaaagttatcccacttaactatgttgctcttggagattctctgaccgaaggtgtgggcgatacaacctctcaaggtggttttgttccactgctatcagaatcactccataatcgatactcttaccaagtgacttctgttaattatggtgtgtctgggaatactagtcaacaaattttaaaacgtatgacgacagatcctcaaatcgaaaaagatttagagaaagctgatttattgacgctaactgttggtggtaatgatgtcttggctgttattcgtaaagagctcagtcatttatcactaaattcctttgagaaaccagcagaagcatataaggaacgtttgaaagaaatccttgcaaaagcaagacaagataatcctaaattgcctatttatgttttaggcatttataatcctttttacctaaactttccacaattaactaaaatgcaaaccgttattgataattggaataaagctacaaaagaagtagttgatgcttcagaaaatgtttattttgtcccaattaatgaccgcctttataagggaataaatggtaaagagggtattacagagtcatcaaatagtcaggcaagtatcactaatgatgctctctttactggagaccattttcatcccaataatattggctatcaaatcatgtctaacgccgttatggagaaaataaatgaaacaagaaaaaactggccgaacccagctttcttgtacaaa

SEQ ID NO: 230 - DNA, 820 bp, Streptococcus agalactiae
agtttgtacaaaaaagcaggctctattttttccttgatcattccaaaatcaaatcctaaattaacaaaaaaagacttcctaacaaagaaagttatcccacttaactatgttgctcttggagattctctgaccgaaggtgtgggcgatacaacctctcaaggtggttttgttccactgctatcagaatcactccataatcgatactcttaccaagtgacttctgttaattatggtgtgtctgggaatactagtcaacaaattttaaaacgtatgacgacagatcctcaaatcgaaaaagatttagagaaagctgatttattgacgctaactgttggtggtaatgatgtcttggctgttattcgtaaagagctcagtcatttatcactaaattcctttgagaaaccagcagaagcatataaggaacgtttgaaagaaatccttgcaaaagcaagacaagataatcctaaattgcctatttatgttttaggcatttataatcctttttacctaaactttccacaattaactaaaatgcaaaccgttattgataattggaataaagctacaaaagaagtagttgatgcttcagaaaatgtttattttgtcccaattaatgaccgcctttataagggaataaatggtaaagagggtattacagagtcatcaaatagtcaggcaagtatcactaatgatgctctctttactggagaccattttcatcccaataatattggctatcaaatcatgtctaacgccgttatggagaaaataaatgaaacaagaaaaaactggccgaacccagctttcttgtacaaagtgg

SEQ ID NO: 231 - DNA, 821 bp, Streptococcus agalactiae; identical to SEQ ID NO: 226

SEQ ID NO: 232 - protein, 257 aa, Streptococcus agalactiae
IFSLIIPKSNPKLTKKDFLTKKVIPLNYVALGDSLTEGVGDTTSQGGFVPLLSESLHNRYSYQVTSVNYGVSGNTSQQILKRMTTDPQIEKDLEKADLLTLTVGGNDVLAVIRKELSHLSLNSFEKPAEAYKERLKEILAKARQDNPKLPIYVLGIYNPFYLNFPQLTKMQTVIDNWNKATKEVVDASENVYFVPINDRLYKGINGKEGITESSNSQASITNDALFTGDHFHPNNIGYQIMSNAVMEKINETRKNWP

SEQ ID NO: 233 - protein, 257 aa, Streptococcus agalactiae
IFSLIIPKSNPKLTKKDFLTKKVIPLNYVALGDSLTEGVGDTTSQGGFVPLLSESLHNRYSYQVTSVNYGVSGNTSQQILKRMTTDPQIEKDLEKADLLTLTVGGNDVLAVIRKELSHLSLNSFEKPAEAYKERLKEILAKARQDNPKLPIYVLGIYNPFYLNFPQLTKMQTVIDNWNKATKEVVDASENVYFVPINDRLYKGINGKEGIIESSNSQASITNDALFTGDHFHPNNIGYQIMSNAVMEKINETRKNWP

SEQ ID NO: 234 - protein, 257 aa, Streptococcus agalactiae; identical to SEQ ID NO: 232

SEQ ID NO: 235 - protein, 257 aa, Streptococcus agalactiae; identical to SEQ ID NO: 232

SEQ ID NO: 236 - protein, 257 aa, Streptococcus agalactiae; identical to SEQ ID NO: 232

SEQ ID NO: 237 - protein, 257 aa, Streptococcus agalactiae; identical to SEQ ID NO: 232

SEQ ID NO: 238 - protein, 257 aa, Streptococcus agalactiae; identical to SEQ ID NO: 232

SEQ ID NO: 239 - protein, 257 aa, Streptococcus agalactiae; identical to SEQ ID NO: 232

SEQ ID NO: 240 - protein, 257 aa, Streptococcus agalactiae; identical to SEQ ID NO: 232

SEQ ID NO: 241 - DNA, 393 bp, Streptococcus agalactiae
gatacaagtgataagaatactgacacgagtgtcgtgactacgaccttatctgaggagaaaagatcagatgaactagaccagtctagtactggttcttcttctgaaaatgaatcgagttcatcaagtgaaccagaaacaaatccgtcaactaatccacctacaacagaaccatcgcaaccctcacctagtgaagagaacaagcctgatggtagaacgaagacagaaattggcaataataaggatatttctagtggaacaaaagtattaatttcagaagatagtattaagaattttagtaaagcaagtagtgatcaagaagaagtggatcgcgatgaatcatcatcttcaaaagcaagtgatgggaaaaaaggccacagtaagcctaaaaaggaa

SEQ ID NO: 242 - DNA, 393 bp, Streptococcus agalactiae
gatacaagtgataagaatactgacacgagtgtcgtgactacgaccttatctgaggagaaaagatcagatgaactagaccagtctagtactggttcttcttctgaaaatgaatcgagttcatcaagtgaaccagaaacaaatccgtcaactaatccacctacaacagaaccatcgcaaccctcacctagtgaagagaacaagcctgatggtagaacgaagacagaaattggcaataataaggatatttctagtggaacaaaagtattaatttcagaagatagtattaagaattttagtaaagcaagtagtgatcaagaagaagtggatcgcgatgaatcatcatcttcaaaagcaaatgatgggaaaaaaggccacagtaagcctaaaaaggaa

SEQ ID NO: 243 - DNA, 393 bp, Streptococcus agalactiae; identical to SEQ ID NO: 242

SEQ ID NO: 244 - DNA, 318 bp, Streptococcus agalactiae
gaccagtctagtactggttcttcttctgaaaatgaatcgagttcatcaagtgaaccagaaacaaatccgtcaactaatccacctacaacagaaccatcgcaaccctcacctagtgaagagaacaagcctgatggtagaacgaagacagaaattggcaataataaggatatttctagtggaacaaaagtattaatttcagaagatagtattaagaattttagtaaagcaagtagtgatcaagaagaagtggatcgcgatgaatcatcatcttcaaaagcaaatgatgggaaaaaaggccacagtaagcctaaaaaggaa

SEQ ID NO: 245 - DNA, 393 bp, Streptococcus agalactiae
gatacaagtgataagaatactgacacgagtgtcgtgactacgaccttatctgaggagaaaagattagatgaactagaccagtctagtactggttcttcttctgaaaatgaatcgagttcatcaagtgaaccagaaacaaatccctcaactaatccacctacaacagaaccatcgcaaccctcacctagtgaagagaacaagcctgatggtagcacgaagacagaaattggcaataataaggatatttctagtggaacaaaagtattaatttcagaagatagtattaagaattttagtaaagcaagtagtgatcaagaagaagtggatcgcgatgaatcatcatcttcaaaagcaaatgatgagaaaaaaggccacagtaagcctaaaaaggaa

SEQ ID NO: 246 - DNA, 393 bp, Streptococcus agalactiae; identical to SEQ ID NO: 242

SEQ ID NO: 247 - DNA, 393 bp, Streptococcus agalactiae
gatacaagtgataagaatactgacacgagtgtcgtgactacgaccttatctgaggagaaaagatcagatgaactagaccagtctagtactggttcttcttctgaaaatgaatcaagttcatcaagtgaaccagaaacaaatccctcaactaatccacctacaacagaaccatcgcaaccctcacctagtgaagagaacaagcctgatgggagcacgaagacagaaattggcaataataaggatatttctagtggaacaaaagtattaatttcagaagatagtattaagaattttagtaaagcaagtagtgatcaagaagaagtggaacgcgatgaatcatcatcttcaaaagcaaatgatgagaaaaaaggccacagtaagcctaaaaaggaa

SEQ ID NO: 248 - DNA, 393 bp, Streptococcus agalactiae
gatacaagtgataagaatactgacacgagtgtcgtgactacgaccttatctgaggagaaaagattagatgaactagaccagtctagtactggttcttcttctgaaaatgaatcgagttcatcaagtgaaccagaaacaaatccctcaactaatccacctacaacagaaccatcgcaaccctcacctagtgaagagaacaagcctgatggtagcacgaagacagaaattggcaataataaggatatttctagtggaacaaaagtattaatttcagaagatagtattaagaattttagtaaagcaagtagtgatcaagaaraagtggatcgcgatgaatcatcatcttcaaaagcaaatgatgagaaaaaaggccacagtaagcctaaaaaggaa

SEQ ID NO: 249 - DNA, 393 bp, Streptococcus agalactiae; identical to SEQ ID NO: 245

SEQ ID NO: 250 - DNA, 393 bp, Streptococcus agalactiae; identical to SEQ ID NO: 247

SEQ ID NO: 251 - DNA, 393 bp, Streptococcus agalactiae
gatacaagtgataagaatactgacacgagtgtcgtgactacgaccttatctgaggagaaaagatcagatgaactagaccagtctagtactggttcttcttctgaaaatgaatcaagttcatcaagtgaaccagaaacaaatccctcaactaatccacctacaacagaaccatcgcaaccctcacctagtgaagagaacaagcctgatgggagcacgaagacagaaattggcaataataaggatatttctagtggaacaaaagtattaatttcagaagatagtattaagaattttagtaaagcaagtagtgatcaagaagaagtggatcgcgatgaatcatcatcttcaaaagcaaatgatgagaaaaaaggccacagtaagcctaaaaaggaa

SEQ ID NO: 252 - protein, 131 aa, Streptococcus agalactiae
DTSDKNTDTSVVTTTLSEEKRSDELDQSSTGSSSENESSSSSEPETNPSTNPPTTEPSQPSPSEENKPDGRTKTEIGNNKDISSGTKVLISEDSIKNFSKASSDQEEVDRDESSSSKASDGKKGHSKPKKE

SEQ ID NO: 253 - protein, 131 aa, Streptococcus agalactiae
DTSDKNTDTSVVTTTLSEEKRSDELDQSSTGSSSENESSSSSEPETNPSTNPPTTEPSQPSPSEENKPDGRTKTEIGNNKDISSGTKVLISEDSIKNFSKASSDQEEVDRDESSSSKANDGKKGHSKPKKE

SEQ ID NO: 254 - protein, 131 aa, Streptococcus agalactiae; identical to SEQ ID NO: 253

SEQ ID NO: 255 - protein, 106 aa, Streptococcus agalactiae
DQSSTGSSSENESSSSSEPETNPSTNPPTTEPSQPSPSEENKPDGRTKTEIGNNKDISSGTKVLISEDSIKNFSKASSDQEEVDRDESSSSKANDGKKGHSKPKKE

SEQ ID NO: 256 - protein, 131 aa, Streptococcus agalactiae
DTSDKNTDTSVVTTTLSEEKRLDELDQSSTGSSSENESSSSSEPETNPSTNPPTTEPSQPSPSEENKPDGSTKTEIGNNKDISSGTKVLISEDSIKNFSKASSDQEEVDRDESSSSKANDEKKGHSKPKKE

SEQ ID NO: 257 - protein, 131 aa, Streptococcus agalactiae; identical to SEQ ID NO: 253

SEQ ID NO: 258 - protein, 131 aa, Streptococcus agalactiae
DTSDKNTDTSVVTTTLSEEKRSDELDQSSTGSSSENESSSSSEPETNPSTNPPTTEPSQPSPSEENKPDGSTKTEIGNNKDISSGTKVLISEDSIKNFSKASSDQEEVERDESSSSKANDEKKGHSKPKKE

SEQ ID NO: 259 - protein, 131 aa, Streptococcus agalactiae
  VARIANT 107: Xaa = Any Amino Acid
DTSDKNTDTSVVTTTLSEEKRLDELDQSSTGSSSENESSSSSEPETNPSTNPPTTEPSQPSPSEENKPDGSTKTEIGNNKDISSGTKVLISEDSIKNFSKASSDQEXVDRDESSSSKANDEKKGHSKPKKE

SEQ ID NO: 260 - protein, 131 aa, Streptococcus agalactiae; identical to SEQ ID NO: 256

SEQ ID NO: 261 - protein, 131 aa, Streptococcus agalactiae; identical to SEQ ID NO: 258

SEQ ID NO: 262 - protein, 131 aa, Streptococcus agalactiae
DTSDKNTDTSVVTTTLSEEKRSDELDQSSTGSSSENESSSSSEPETNPSTNPPTTEPSQPSPSEENKPDGSTKTEIGNNKDISSGTKVLISEDSIKNFSKASSDQEEVDRDESSSSKANDEKKGHSKPKKE

SEQ ID NO: 263 - DNA, 1260 bp, Streptococcus agalactiae
tttgttgttaaaggtgatactgtacttcacaagcccaccaataaaccttttgttgttaaaggagtagacgttgagtcttccttagcaggttatcatcacaacgattttcctattactcaaaaaacgtatcgtgagtggttccatttaatttccaacatgggggcaaatactgtaagagtcaaagtaccgatgaatgttgcattttacgatgctttatatcaccacaacaaagcatcaaagaggccactgtatttgttgcaaggaatacgtatagattcttatcgcaataatgcttctataacagcttttaatgataattatagggggtatttaaaacgagaagcaaaaggcgttgtggatattctccatgggcgtaagcaagtatggaatactgattttggtagccgtcattatcattatgatcttagtccttgggtacttggttatgtcgtaggggatgattggaatagtggtactgtcgcttatactaatcatcaagagaaaaaaacgcaatataaaggacgttattttaaaacttctgcggcagctaatccatttgaggtcatgctagctcaagttatggatgaattgacacattatgagacagctaaatatggttggcaacatttgattagtttttcaaactcaccaacaacagacccttttcgttatcgaaaaccatttgaggcacaggctcctaaatacgtacaactaaatgtagaaaatattcaagctaattcgaatgttaaagcaggtatttttgcagcatataaagctattgatttccatcctcgatacaaggattatctattatttgataaagagaatatcagtaaagaagatagacaaaagattaaagaactttctttgtcacagggatacgttaaactgctaaatgcttatcacaaaatccctgttctagtcacgggttatggctattcgacagcgagaggtattgcccaaaaagaaattgataaacgtcctctgccgattaatgaaaaagaacaaggtcagcgtttactagaagattatgaatcttttatatcatccggtagttttggagcgactatcaatgcatggcaagacgattggaatgcaagggcgtggaatacatccttcgccacaaataaacatagtcaattcctatggggggatgcacaagtatttaatcaaggttatggtttattaggctttaaaaacgcaaaacatcattatcaagttgatggtaaaagaggcaaaggagagtggaaacatcctctg

SEQ ID NO: 264 - DNA, 739 bp, Streptococcus agalactiae
atgactagtgcaacaggagatgacttatatgctagcagtgatgaaagctatctctaccttgcgattaaaacaaaacctgaaaaactaaaagaaaaacgattattaccaatagatattacaccaaaatctggtagtagaaaaatgaatggtagtaaggtcacattttctaaatctagtgactttgtattgtctattgatccaaatggcaagtctgaattatttgtccaagagcgctataatgccttaaaagcgaactatcttcgacagcttaacggtaaagatttttatgctttcccaccaaagaagaacagtagtaattttgagcagatcaatatggtattgagaaatacaaagattgttgaagacatggaaaaagtaaaagcaacagagaggttcttaccaactcatcctactggtcttctcaaaacaggaacaattgataggcaccaaaaaacatttgattcacaaacagatatttcgtttggaaaggactttatagaggtcagaattccgtggcagttgttgaatttttctgatccatcatctcaaaaaattcacgatgattactttaaacattatggtgtgaaggagttagaaattgagagcattgctttaggattaggtgctaatagcaaagaaaacacactgataaagatggcagattatcgtttgaaaaattgggagagacccgataccaaaacctttttaaaagactcctattatagtatttaagaaagaa

SEQ ID NO: 265 - DNA, 2030 bp, Streptococcus agalactiae
aagggcttattaaaagaaaatacaagaactaactttgttgttaaaggtgatactgtacttcacaagcccaccaataaaccttttgttgttaaaggagtagacgttgagtcttccttagcgggttatcatcacaacgattttcctattactcaaaaaacgtatcgtgaatggttccatttaatttccaacatgggggcaaatactgtaagagtcaaggtaccgatgaatgttgcattttacgatgccttatatcaccacaacaaagcatcaaagaggccactgtatttgttgcaaggaatacgtatagattcttatcgcaataatgcttctataacagcttttaatgataattatagggggtatttaaaacgagaagcaaaaggcgttgtggatattctccatgggcgtaagcaagtatggaatactgatttgggtagccgtcattatcattatgatcttagtccttgggtacttggttatgtcgtaggggatgattggaatagtggtactgtcgcttatactaatcatcaagagaaaaaaacgcaatataaaggacgttattttaaaacttctgtggcagctaatccatttgaggtcatgctagctcaagtaatggatgaattgacacattatgagacagctaaatatggttggcaacatttgattagtttttcaaactcaccaacaacagacccttttcattatcgaaaaccatttgaggcacaggctcctaaatacgtacaactaaatgtagaaaatattcaagctaattcaaatgttaaagcaggtatgtttgcagcatataaagctattgatttccatcctcgatacaaggattatctattatttgataaagagaatatcagtaaagaagatagacaaaagattaaagaactttctttgtcacagggatacgttaaactgctaaatgcttatcacaaaatccctgttctagtcacgggttatggctattcgacagcgagaggtattgcccaaaaagaaattgataaacgtcctctgccgattaatgaaaaagaacaaggtcagcgtttactagaagattatgaatcttttatatcatccggtagttttggagcgactatcaatgcatggcaagacgattggaatgcaagggcgtggaatacatctttcgccacaaataaacatagtcaattcctatggggggatgcacaagtatttaatcaaggttatggtttattaggctttaaaaacgcaaaacatcattatcaagttgatggtaaaagaggcaaaggagagtggaaacatcctctgatgactagtgcaacaggagatgacttatatgctagcagtgatgaaagctatctctaccttgcgattaaaacaaaacctgaaaaactaaaagaaaaacgattattaccaatagatattacaccaaaatctggtagtagaaaaatgaatggtagtaaggtcacattttctaaatctagtgactttgtattgtctattgatccaaatggcaagtctgaattatttgtccaagagcgctataatgccttaaaagcgaactatcttcgacagcttaacggtaaagatttttatgctttcccaccaaagaagaacagtagtaattttgagcagataaatatggtattgagaaatacaaagattgttgaagacatggaaaaagtaaaagcaacagagaggttcttaccaactcatcctactggtcttctcaaaacaggaacaactgataggcaccaaaaaacatttgattcacaaacagatatttcgtttggaaaggactttatagaggtcagaattccgtggcagttgttgaatttttctgatccatcatctcaaaaaattcacgatgattactttaaacattatggtgtgaaggagttagaaattgagagcattgctttaggattaggtgctaatagcaaagaaaacacactgataaagatggcagattatcgtttgaaaaattgggagagacccgataccaaaacctttttaaaagactcctattatgtattaagaaagaa

SEQ ID NO: 266 - DNA, 2057 bp, Streptococcus agalactiae
tattaaaagaaaatacaagaactaactttgttgttaaaggtgatactgtacttcacaagcccaccaataaaccttttgttgttaaaggagtagacgttgagtcttccttagcgggttatcatcacaacgattttcctattactcaaaaaacgtatcgtgaatggttccatttaatttccaacatgggggcaaatactgtaagagtcaaggtaccgatgaatgttgcattttacgatgccttatatcaccacaacaaagcatcaaagaggccactgtatttgttgcaaggaatacgtatagattcttatcgcaataatgcttctataacagcttttaatgataattatagggggtatttaaaacgagaagcaaaaggcgttgtggatattctccatgggcgtaagcaagtatggaatactgatttgggtagccgtcattatcattatgatcttagtccttgggtacttggttatgtcgtaggggatgattggaatagtggtactgtcgcttatactaatcatcaagagaaaaaaacgcaatataaaggacgttattttaaaacttctgtggcagctaatccatttgaggtcatgctagctcaagtaatggatgaattgacacattatgagacagctaaatatggttggcaacatttgattagtttttcaaactcaccaacaacagacccttttcattatcgaaaaccatttgaggcacaggctcctaaatacgtacaactaaatgtagaaaatattcaagctaattcaaatgttaaagcaggtatgtttgcagcatataaagctattgatttccatcctcgatacaaggattatctattatttgataaagagaatatcagtaaagaagatagacaaaagattaaagaactttctttgtcacagggatacgttaaactgctaaatgcttatcacaaaatccctgttctagtcacgggttatggctattcgacagcgagaggtattgcccaaaaagaaattgataaacgtcctctgccgattaatgaaaaagaacaaggtcagcgtttactagaagattatgaatcttttatatcatccggtagttttggagcgactatcaatgcatggcaagacgattggaatgcaagggcgtggaatacatctttcgccacaaataaacatagtcaattcctatggggggatgcacaagtatttaatcaaggttatggtttattaggctttaaaaacgcaaaacatcattatcaagttgatggtaaaagaggcaaaggagagtggaaacatcctctgatgactagtgcaacaggagatgacttatatgctagcagtgatgaaagctatctctaccttgcgattaaaacaaaacctgaaaaactaaaagaaaaacgattattaccaatagatattacaccaaaatctggtagtagaaaaatgaatggtagtaaggtcacattttctaaatctagtgactttgtattgtctattgatccaaatggcaagtctgaattatttgtccaagagcgctataatgccttaaaagcgaactatcttcgacagcttaacggtaaagatttttatgctttcccaccaaagaagaacagtagtaattttgagcagataaatatggtattgagaaatacaaagattgttgaagacatggaaaaagtaaaagcaacagagaggttcttaccaactcatcctactggtcttctcaaaacaggaacaactgataggcaccaaaaaacatttgattcacaaacagatatttcgtttggaaaggactttatagaggtcagaattccgtggcagttgttgaatttttctgatccatcatctcaaaaaattcacgatgattactttaaacattatggtgtgaaggagttagaaattgagagcattgctttaggattaggtgctaatagcaaagaaaacacactgataaagatggcagattatcgtttgaaaaattgggagagacccgataccaaaacctttttaaaagactcctattatagtattaagaaagaatggtctaaagaaagagagagaacatatggtcca

SEQ ID NO: 267 - DNA, 2008 bp, Streptococcus agalactiae
aagggcttattaaaagaaaatacaagaactaactttgttgttaaaggtgatactgtacttcacaagcccaccaataaaccttttgttgttaaaggagtagacgttgagtcttccttagcgggttatcatcacaacgattttcctattactcaaaaaacgtatcgtgaatggttccatttaatttccaacatgggggcaaatactgtaagagtcaaggtaccgatgaatgttgcattttacgatgccttatatcaccacaacaaagcatcaaagaggccactgtatttgttgcaaggaatacgtatagattcttatcgcaataatgcttctataacagcttttaatgataattatagggggtatttaaaacgagaagcaaaaggcgttgtggatattctccatgggcgtaagcaagtatggaatactgatttgggtagccgtcattatcattatgatcttagtccttgggtacttggttatgtcgtaggggatgattggaatagtggtactgtcgcttatactaatcatcaagagaaaaaaacgcaatataaaggacgttattttaaaacttctgtggcagctaatccatttgaggtcatgctagctcaagtaatggatgaattgacacattatgagacagctaaatatggttggcaacatttgattagtttttcaaactcaccaacaacagacccttttcattatcgaaaaccatttgaggcacaggctcctaaatacgtacaactaaatgtagaaaatattcaagctaattcaaatgttaaagcaggtatgtttgcagcatataaagctattgatttccatcctcgatacaaggattatctattatttgataaagagaatatcagtaaagaagatagacaaaagattaaagaactttctttgtcacagggatacgttaaactgctaaatgcttatcacaaaatccctgttctagtcacgggttatggctattcgacagcgagaggtattgcccaaaaagaaattgataaacgtcctctgccgattaatgaaaaagaacaaggtcagcgtttactagaagattatgaatcttttatatcatccggtagttttggagcgactatcaatgcatggcaagacgattggaatgcaagggcgtggaatacatctttcgccacaaataaacatagtcaattcctatggggggatgcacaagtatttaatcaaggttatggtttattaggctttaaaaacgcaaaacatcattatcaagttgatggtaaaagaggcaaaggagagtggaaacatcctctgatgactagtgcaacaggagatgacttatatgctagcagtgatgaaagctatctctaccttgcgattaaaacaaaacctgaaaaactaaaagaaaaacgattattaccaatagatattacaccaaaatctggtagtagaaaaatgaatggtagtaaggtcacattttctaaatctagtgactttgtattgtctattgatccaaatggcaagtctgaattatttgtccaagagcgctataatgccttaaaagcgaactatcttcgacagcttaacggtaaagatttttatgctttcccaccaaagaagaacagtagtaattttgagcagataaatatggtattgagaaatacaaagattgttgaagacatggaaaaagtaaaagcaacagagaggttcttaccaactcatcctactggtcttctcaaaacaggaacaactgataggcaccaaaaaacatttgattcacaaacagatatttcgtttggaaaggactttatagaggtcagaattccgtggcagttgttgaatttttctgatccatcatctcaaagaattcacgatgattactttaaacattatggtgtgaaggagttagaaaattgagagccattgctttaggattaggtgctaatagcaaagaaaacacactgataaagatggcagattatcgtttgaaaaattgggagagacccgataccaaaacctttttaaaaga

SEQ ID NO: 268 - DNA, 2059 bp, Streptococcus agalactiae
tattactttgatggtagtttgtatttaccaaagggcttattaaaagaaaatacaagaactaactttgttgttaaaggtgatactgtacttcacaagcccaccaataaaccttttgttgttaaaggagtagacgttgagtcttccttagcgggttatcatcacaacgattttcctattactcaaaaaacgtatcgtgaatggttccatttaatttccaacatgggggcaaatactgtaagagtcaaggtaccgatgaatgttgcattttacgatgccttatatcaccacaacaaagcatcaaagaggccactgtatttgttgcaaggaatacgtatagattcttatcgcaataatgcttctataacagcttttaatgataattatagggggtatttaaaacgagaagcaaaaggcgttgtggatattctccatgggcgtaagcaagtatggaatacagattttggtagccgtcattatcattatgatcttagtccttgggtacttggttatgtcgtaggggatgattggaatagtggtactgtcgcttatactaatcatcaagagaaaaaaacgcaatataaaggacgttattttaaaacttctgtggcagctaatccatttgaggtcatgctagctcaagtaatggatgaattgacacattatgagacagctaaatatggttggcaacatttgattagtttttcaaactcaccaacaacagacccttttcattatcgaaaaccatttgaggcacaggctcctaaatacgtacaactaaatgtagaaaatattcaagctaattcaaatgttaaagcaggtatgtttgcagcatataaagctattgatttccatcctcgatacaaggattatctattatttgataaagagaatatcagtaaagaagatagacaaaagattaaagaactttctttgtcacagggatacgttaaactgctaaatgcttatcacaaaatccctgttctagtcacgggttatggctattcgacagcgagaggtattgcccaaaaagaaattgataaacgtcctctgccgattaatgaaaaagaacaaggtcagcgtttactagaagattatgaatcttttatatcatccggtagttttggagcgactatcaatgcatggcaagacgattggaatgcaagggcgtggaatacatctttcgccacaaataaacataatcaattcctatggggggatgcacaagtatttaatcaaggttatggtttattaggctttaaaaacgcaaaacatcattatcaagttgatggtaaaagaggcaaaggagagtggaaacatcctctgatgactagtgcaacaggagatgacttatatgctagcagtgatgaaagctatctctaccttgcgattaaaacaaaacctgaaaaactaaaagaaaaacgattattaccaatagatattacaccaaaatctggtagtagaaaaatgaatggtagtaaggtcacattttctaaatctagtgactttgtattgtctattgatccaaatggcaagtctgaattatttgtccaagagcgctataatgccttaaaagcgaactatcttcgacagcttaacggtaaagatttttatgctttcccaccaaagaagaacagtagtaattttgagcagataaatatggtattgagaaatacaaagattgttgaagacatggaaaaagtaaaagcaacagagaggttcttaccaactcatcctactggtcttctcaaaacaggaacaactgataggcaccaaaaaacatttgattcacaaacagatatttcgtttggaaaggactttatagaggtcagaattccgtggcagttgttgaatttttctgatccatcatctcaaaaaattcacgatgattactttaaacattatggtgtgaaggagttagaaattgagagcattgctttaggattaggtgctaatagcaaagaaaacacactgataaagatggcagattatcgtttgaaaaattgggagagacccgataccaaaacctttttaaaagactcctattatgtattaagaaaga

SEQ ID NO: 269 - DNA, 2015 bp, Streptococcus agalactiae
tttaccacagggcttattaaaagaaaatacaagaactaactttgttgttaaaggtgatactgtacttcacaagcccaccaataaaccttttgttgttaaaggagtagacgttgagtcttccttagcgggttatcatcacaacgattttcctattactcaaaaaacgtatcgtgaatggttccatttaatttccaacatgggggcaaatactgtaagagtcaaggtaccgatgaatgttgcattttacgatgccttatatcaccacaacaaagaatcaaagaggccactgtatttgttgcaaggaatacgtatagattcttatcgcaataatgcttctataacagcttttaatgataattatagggggtatttaaaacgagaagcaaaaggcgttgtggatattctccatgggcgtaagcaagtatggaatactgattttggtagccgtcattatcattatgatcttagtccttgggtacttggttatgtcgtaggggatgattggaatagtggtactgtcgcttatactaatcatcaagagaaaaaaacgcaatataaaggacgttattttaaaacttctgtggcagctaatccatttgaggtcatgctagctcaagtaatggatgaattgacacattatgagacagctaaatatggttggcaacatttgattagtttttcaaactcaccaacaacagacccttttcattatcgaaaaccatttgaggcacaggctcctaaatacgtacaactaaatgtagaaaatattcaagctaattcaaatgttaaagcaggtatgtttgcagcatataaagctattgatttccatcctcgatacaaggattatctattatttgataaagagaatatcagtaaagaagatagacaaaagattaaagaactttctttgtcacagggatacgttaaactgctaaatgcttatcacaaaatccctgttctagtcacgggttatggctattcgacagcgagaggtattgcccaaaaagaaattgataaacgtcctctgccgattaatgaaaaagaacaaggtcagcgtttactagaagattatgaatcttttatatcatccggtagttttggagcgactatcaatgcatggcaagacgattggaatgcaagggcgtggaatacatctttcgccacaaataaacatagtcaattcctatggggggatgcacaagtatttaatcaaggttatggtttattaggctttaaaaacgcaaaacatcattatcaagttgatggtaaaagaggcaaaggagagtggaaacatcctctgatgactagtgcaacaggagatgacttatatgctagcagtgatgaaagctatctctaccttgcgattaaaacaaaacctgaaaaactaaaagaaaaacgattattaccaatagatattacaccaaaatctggtagtagaaaaatgaatggtagtaaggtcacattttctaaatctagtgactttgtattgtctattgatccaaatggcaagtctgaattatttgtccaagagcgctataatgccttaaaagcgaactatcttcgacagcttaacggtaaagatttttatgctttcccaccaaagaagaacagtagtaattttgagcagataaatatggtattgagaaatacaaagattgttgaagacatggaaaaagtaaaagcaacagagaggttcttaccaactcatcctactggtcttctcaaaacaggaacaactgataggcaccaaaaaacatttgattcacaaccagatatttcgtttggaaaggactttatagaggtcagaattccgtggcagttgttgaatttttctgatccatcatctcaaaaaattcacgatgattactttaaacattatggtgtgaaggagttagaaattgagagcattgctttaggattaggtgctaatagcaaagaaaacacactgataaagatggcagattatcgtttgaaaaattgggagagacccgataccaaaacctttttaaaagact

SEQ ID NO: 270 - DNA, 2022 bp, Streptococcus agalactiae
aaggggcttattaaaagaaaatacaagaactaactttgttgttaaaggtgatactgtacttcacaagcccaccaataaaccttttgttgttaaaggagtagacgttgagtcttccttagcgggttatcatcacaacgattttcctattactcaaaaaacgtatcgtgaatggttccatttaatttccaacatgggggcaaatactgtaagagtcaaggtaccgatgaatgttgcattttacgatgccttatatcaccacaacaaagcatcaaagaggccactgtatttgttgcaaggaatacgtatagattcttatcgcaataatgcttctataacagcttttaatgataattatagggggtatttaaaacgagaagcaaaaggcgttgtggatattctccatgggcgtaagcaagtatggaatactgattttggtagcagtcattatcattatgatcttagtccttgggtacttggttatgtcgtaggggatgatggacatagtggtactgtcgctttatactaatcatcaagaggagaaaaacgcaatataaaggacgttattttaaaacttctgtggcagctaatccatttgaggtcatgctagctcaagtaatggatgaattgacacattatgagacagctaaatatggttggcaacatttgattagtttttcaaactcaccaacaacagacccttttcattatcgaaaaccatttgaggcacaggctcctaaatacgtacaactaaatgtagaaaatattcaagctaattcgaatgttaaagcaggtatgtttgcagcatataaagctattgatttccatcctcgatacaaggattatctattatttgataaagagaatatcagtaaagaagatagacaaaagattaaagaactttctttgtcacagggatacgttaaactgctaaatgcttatcacaaaatccctgttctagtcacgggttatggctactcgacagcgagaggtattgcccaaaaagaaattgataaacgtcctctgccgattaatgaaaaagaacaaggtcagcgtttactagaagattatgaatcttttatatcatccggtagttttggagcgactatcaatgcatggcaagacgattggaatgcaagggtgtggaatacatccttcgccacaaataaacatagtcaattcctatggggggatgcacaagtatttaatcaaggttatggtttattaggctttaaaaacgcaaaacatcattatcaggttgatggtaaaagaggcaaagaagagtggaaacatcctctgatgactagtgcaacaggagatgacttatatgctagcagtgatgaaagctatctctaccttgcgattaaaacaaaacctgaaaaactaaaagaaaaacgattattaccaatagatattacaccaaaatctggtagtagaaaaatgaatggtagtaaggtcacattttctaaatctagtgactttgtattgtctattgatccaaatggcaagtctgaattatttgtccaagagcgctataacgccttaaaagcgaactatcttcgacagcttaatggtaaagatttttatgctttcccaccaaagaagaacagtagtaattttgagcagataaatatggtattgagaaatacaaagattgttgaagacatggaaaaagtaaaagcaacagagaggttcttaccaactcatcctactggtcttctcaaaacaggaacaactgataggcaccaaaaaacatttgattcacaaacagatatttcgtttggaaaggactttatagaggtcagaattccgtggcagttgttgaatttttctgatccatcatctcaaaaaattcacgatgattactttaaacattatggtgtgaaggagttagaaattgagagcattgctttaggattaggtgctaatagcaaagaaaacacactgataaagatggcagattatcgtttgaaaaattgggagagacccgataccaaaacctttttaaaagactcctattatagt

SEQ ID NO: 271 - DNA, 1998 bp, Streptococcus agalactiae
actttgttgttaaaggtgatactgtacttcacaagcccaccaataaaccttttgttgttaaaggagtagacgttgagtcttccttagcgggttatcatcacaacgattttcctattactcaaaaaacgtatcgtgaatggttccatttaatttccaacatgggggcaaatactgtaagagtcaaggtaccgatgaatgttgcattttacgatgccttatatcaccacaacaaagcatcaaagaggccactgtatttgttgcaaggaatacgtatagattcttatcgcaataatgcttctataacagcttttaatgataattatagggggtatttaaaacgagaagcaaaaggcgttgtggatattctccatgggcgtaagcaagtatggaatactgattttggtagcagtcattatcattatgatcttagtccttgggtacttggttatgtcgtaggggatgattggaatagtggtactgtcgcttatactaatcatcaagagaaaaaaacgcaatataaaggacgttattttaaaacttctgtggcagctaatccatttgaggtcatgctagctcaagtaatggatgaattgacacattatgagacagctaaatatggttggcaacatttgattagtttttcaaactcaccaacaacagacccttttcattatcgaaaaccatttgaggcacaggctcctaaatacgtacaactaaatgtagaaaatattcaagctaattcgaatgttaaagcaggtatgtttgcagcatataaagctattgatttccatcctcgatacaaggattatctattatttgataaagagaatatcagtaaagaagatagacaaaagattaaagaactttctttgtcacagggatacgttaaactgctaaatgcttatcacaaaatccctgttctagtcacgggttatggctactcgacagcgagaggtattgcccaaaaagaaattgataaacgtcctctgccgattaatgaaaaagaacaaggtcagcgtttactagaagattatgaatcttttatatcatccggtagttttggagcgactatcaatgcatggcaagacgattggaatgcaagggtgtggaatacatccttcgccacaaataaacatagtcaattcctatggggggatgcacaagtatttaatcaaggttatggtttattaggctttaaaaacgcaaaacatcattatcaggttgatggtaaaagaggcaaagaagagtggaaacatcctctgatgactagtgcaacaggagatgacttatatgctagcagtgatgaaagctatctctaccttgcgattaaaacaaaacctgaaaaactaaaagaaaaacgattattaccaatagatattacaccaaaatctggtagtagaaaaatgaatggtagtaaggtcacattttctaaatctagtgactttgtattgtctattgatccaaatggcaagtctgaattatttgtccaagagcgctataacgccttaaaagcgaactatcttcgacagcttaatggtaaagatttttatgctttcccaccaaagaagaacagtagtaattttgagcagataaatatggtattgagaaatacaaagattgttgaagacatggaaaaagtaaaagcaacagagaggttcttaccaactcatcctactggtcttctcaaaacaggaacaactgataggcaccaaaaaacatttgattcacaaacagatatttcgtttggaaaggactttatagaggtcagaattccgtggcagttgttgaatttttctgatccatcatctcaaaaaattcacgatgattactttaaacattatggtgtgaaggagttagaaattgagagcattgctttaggattaggtgctaatagcaaagaaaacacactgataaagatggcagattatcgtttgaaaaattgggagagacccgataccaaaacctttttaaaagactcctattatagtattaagaaag

SEQ ID NO: 272 - DNA, 2005 bp, Streptococcus agalactiae
tacaagaactaactttgttgttaaaggtgatactgtacttcacaagcccaccaataaaccttttgttgttaaaggagtagacgttgagtcttccttagcgggttatcatcacaacgattttcctattactcaaaaaacgtatcgtgaatggttccatttaatttccaacatgggggcaaatactgtaagagtcaaggtaccgatgaatgttgcattttacgatgccttatatcaccacaacaaagaatcaaagaggccactgtatttgttgcaaggaatacgtatagattcttatcgcaataatgcttctataacagcttttaatgataattatagggggtatttaaaacgagaagcaaaaggcgttgtggatattctccatgggcgtaagcaagtatggaatactgattttggtagccgtcattatcattatgatcttagtccttgggtacttggttatgtcgtaggggatgattgcaatagtggtactgtcgcttatactaatcatcaagagaaaaaaacgcaatataaaggacgttattttaaaacttctgtggcagctaatccatttgaggtcatgctagctcaagtaatggatgaattgacacattatgagacagctaaatatggttggcaacatttgattagtttttcaaactcaccaacaacagacccttttcattatcgaaaaccatttgaggcacaggctcctaaatacgtacaactaaatgtagaaaatattcaagctaattcaaatgttaaagcaggtatgtttgcagcatataaagctattgatttccatcctcgatacaaggattatctattatttgataaagagaatatcagtaaagaagatagacaaaagattaaagaactttctttgtcacagggatacgttaaactgctaaatgcttatcacaaaatccctgttctagtcacgggttatggctattcgacagcgagaggtattgcccaaaaagaaattgataaacgtcctctgccgattaatgaaaaagaacaaggtcagcgtttactagaagattatgaatcttttatatcatccggtagttttggagcgactatcaatgcatggcaagacgattggaatgcaagggcgtggaatacatctttcgccacaaataaacatagtcaattcctatggggggatgcacaagtatttaatcaaggttatggtttattaggctttaaaaacgcaaaacatcattatcaagttgatggtaaaagaggcaaaggagagtggaaacatcctctgatgactagtgcaacaggagatgacttatatgctagcagtgatgaaagctatctctaccttgcgattaaaacaaaacctgaaaaactaaaagaaaaacgattattaccaatagatattacaccaaaatctggtagtagaaaaatgaatggtagtaaggtcacattttctaaatctagtgactttgtattgtctattgatccaaatggcaagtctgaattatttgtccaagagcgctataatgccttaaaagcgaactatcttcgacagcttaacggtaaagatttttatgctttcccaccaaagaagaacagtagtaattttgagcagataaatatggtattgagaaatacaaagattgttgaagacatggaaaaagtaaaagcaacagagaggttcttaccaactcatcctactggtcttctcaaaacaggaacaactgataggcaccaaaaaacatttgattcacaaacagatatttcgtttggaaaggactttatagaggtcagaattccgtggcagttgttgaatttttctgatccatcatctcaaaaaattcacgatgattactttaaacattatggtgtgaaggagttagaaattgagagcattgctttaggattaggtgctaatagcaaagaaaacacactgataaagatggcagattatcgtttgaaaaattgggagagacccgataccaaaacctttttaaaagactcctattatagtattaag

SEQ ID NO: 273 - DNA, 2058 bp, Streptococcus agalactiae
tttgatggtagtttgtatttaccacagggcttattaaaagaaaatacaagaactaactttgttgttaaaggtgatactgtacttcacaagcccaccaataaaccttttgttgttaaaggagtagacgttgagtcttccttagcgggttatcatcacaacgattttcctattactcaaaaaacgtatcgtgaatggttccatttaatttccaacatgggggcaaatactgtaagagtcaaggtaccgatgaatgttgcattttacgatgccttatatcaccacaacaaagaatcaaagaggccactgtatttgttgcaaggaatacgtatagattcttatcgcaataatgcttctataacagcttttaatgataattatagggggtatttaaaacgagaagcaaaaggcgttgtggatattctccatgggcgtaagcaagtatggaatactgattttggtagccgtcattatcattatgatcttagtccttgggtacttggttatgtcgtaggggatgattggaatagtggtactgtcgcttatactaatcatcaagagaaaaaaacgcaatataaaggacgttattttaaaacttctgtggcagctaatccatttgaggtcatgctagctcaagtaatggatgaattgacacattatgagacagctaaatatggttggcaacatttgattagtttttcaaactcaccaacaacagacccttttcattatcgaaaaccatttgaggcacaggctcctaaatacgtacaactaaatgtagaaaatattcaagctaattcaaatgttaaagcaggtatgtttgcagcatataaagctattgatttccatcctcgatacaaggattatctattatttgataaagagaatatcagtaaagaagatagacaaaagattaaagaactttctttgtcacagggatacgttaaactgctaaatgcttatcacaaaatccctgttctagtcacgggttatggctattcgacagcgagaggtattgcccaaaaagaaattgataaacgtcctctgccgattaatgaaaaagaacaaggtcagcgtttactagaagattatgaatcttttatatcatccggtagttttggagcgactatcaatgcatggcaagacgattggaatgcaagggcgtggaatacatctttcgccacaaataaacatagtcaattcctatggggggatgcacaagtatttaatcaaggttatggtttattaggctttaaaaacgcaaaacatcattatcaagttgatggtaaaagaggcaaaggagagtggaaacatcctctgatgactagtgcaacaggagatgacttatatgctagcagtgatgaaagctatctctaccttgcgattaaaacaaaacctgaaaaactaaaagaaaaacgattattaccaatagatattacaccaaaatctggtagtagaaaaatgaatggtagtaaggtcacattttctaaatctagtgactttgtattgtctattgatccaaatggcaagtctgaattatttgtccaagagcgctataatgccttaaaagcgaactatcttcgacagcttaacggtaaagatttttatgctttcccaccaaagaagaacagtagtaattttgagcagataaatatggtattgagaaatacaaagattgttgaagacatggaaaaagtaaaagcaacagagaggttcttaccaactcatcctactggtcttctcaaaacaggaacaactgataggcaccaaaaaacatttgattcacaaacagatatttcgtttggaaaggactttatagaggtcagaattccgtggcagttgttgaatttttctgatccatcatctcaaaaaattcacgatgattactttaaacattatggtgtgaaggagttagaaattgagagcattgctttaggattaggtgctaatagcaaagaaaacacactgataaagatggcagattatcgtttgaaaaattgggagagacccgataccaaaacctttttaaaagactcctattatagtattaagaaagaatgg

SEQ ID NO: 274 - protein, 663 aa, Streptococcus agalactiae
FVVKGDTVLHKPTNKPFVVKGVDVESSLAGYHHNDFPITQKTYREWFHLISNMGANTVRVKVPMNVAFYDALYHHNKASKRPLYLLQGIRIDSYRNNASITAFNDNYRGYLKREAKGVVDILHGRKQVWNTDFGSRHYHYDLSPWVLGYVVGDDWNSGTVAYTNHQEKKTQYKGRYFKTSAAANPFEVMLAQVMDELTHYETAKYGWQHLISFSNSPTTDPFRYRKPFEAQAPKYVQLNVENIQANSNVKAGIFAAYKAIDFHPRYKDYLLFDKENISKEDRQKIKELSLSQGYVKLLNAYHKIPVLVTGYGYSTARGIAQKEIDKRPLPINEKEQGQRLLEDYESFISSGSFGATINAWQDDWNARAWNTSFATNKHSQFLWGDAQVFNQGYGLLGFKNAKHHYQVDGKRGKGEWKHPLMTSATGDDLYASSDESYLYLAIKTKPEKLKEKRLLPIDITPKSGSRKMNGSKVTFSKSSDFVLSIDPNGKSELFVQERYNALKANYLRQLNGKDFYAFPPKKNSSNFEQINMVLRNTKIVEDMEKVKATERFLPTHPTGLLKTGTIDRHQKTFDSQTDISFGKDFIEVRIPWQLLNFSDPSSQKIHDDYFKHYGVKELEIESIALGLGANSKENTLIKMADYRLKNWERPDTKTFLKDSYYSI

SEQ ID NO: 275 - protein, 676 aa, Streptococcus agalactiae
KGLLKENTRTNFVVKGDTVLHKPTNKPFVVKGVDVESSLAGYHHNDFPITQKTYREWFHLISNMGANTVRVKVPMNVAFYDALYHHNKASKRPLYLLQGIRIDSYRNNASITAFNDNYRGYLKREAKGVVDILHGRKQVWNTDLGSRHYHYDLSPWVLGYVVGDDWNSGTVAYTNHQEKKTQYKGRYFKTSVAANPFEVMLAQVMDELTHYETAKYGWQHLISFSNSPTTDPFHYRKPFEAQAPKYVQLNVENIQANSNVKAGMFAAYKAIDFHPRYKDYLLFDKENISKEDRQKIKELSLSQGYVKLLNAYHKIPVLVTGYGYSTARGIAQKEIDKRPLPINEKEQGQRLLEDYESFISSGSFGATINAWQDDWNARAWNTSFATNKHSQFLWGDAQVFNQGYGLLGFKNAKHHYQVDGKRGKGEWKHPLMTSATGDDLYASSDESYLYLAIKTKPEKLKEKRLLPIDITPKSGSRKMNGSKVTFSKSSDFVLSIDPNGKSELFVQERYNALKANYLRQLNGKDFYAFPPKKNSSNFEQINMVLRNTKIVEDMEKVKATERFLPTHPTGLLKTGTTDRHQKTFDSQTDISFGKDFIEVRIPWQLLNFSDPSSQKIHDDYFKHYGVKELEIESIALGLGANSKENTLIKMADYRLKNWERPDTKTFLKDSYYVLRK

SEQ ID NO: 276 - protein, 685 aa, Streptococcus agalactiae
LKENTRTNFVVKGDTVLHKPTNKPFVVKGVDVESSLAGYHHNDFPITQKTYREWFHLISNMGANTVRVKVPMNVAFYDALYHHNKASKRPLYLLQGIRIDSYRNNASITAFNDNYRGYLKREAKGVVDILHGRKQVWNTDLGSRHYHYDLSPWVLGYVVGDDWNSGTVAYTNHQEKKTQYKGRYFKTSVAANPFEVMLAQVMDELTHYETAKYGWQHLISFSNSPTTDPFHYRKPFEAQAPKYVQLNVENIQANSNVKAGMFAAYKAIDFHPRYKDYLLFDKENISKEDRQKIKELSLSQGYVKLLNAYHKIPVLVTGYGYSTARGIAQKEIDKRPLPINEKEQGQRLLEDYESFISSGSFGATINAWQDDWNARAWNTSFATNKHSQFLWGDAQVFNQGYGLLGFKNAKHHYQVDGKRGKGEWKHPLMTSATGDDLYASSDESYLYLAIKTKPEKLKEKRLLPIDITPKSGSRKMNGSKVTFSKSSDFVLSIDPNGKSELFVQERYNALKANYLRQLNGKDFYAFPPKKNSSNFEQINMVLRNTKIVEDMEKVKATERFLPTHPTGLLKTGTTDRHQKTFDSQTDISFGKDFIEVRIPWQLLNFSDPSSQKIHDDYFKHYGVKELEIESIALGLGANSKENTLIKMADYRLKNWERPDTKTFLKDSYYSIKKEWSKERERTYGP

SEQ ID NO: 277 - protein, 669 aa, Streptococcus agalactiae
  VARIANT 632, 637, 639, 648, 649, 656, 668: Xaa = Any Amino Acid
KGLLKENTRTNFVVKGDTVLHKPTNKPFVVKGVDVESSLAGYHHNDFPITQKTYREWFHLISNMGANTVRVKVPMNVAFYDALYHHNKASKRPLYLLQGIRIDSYRNNASITAFNDNYRGYLKREAKGVVDILHGRKQVWNTDLGSRHYHYDLSPWVLGYVVGDDWNSGTVAYTNHQEKKTQYKGRYFKTSVAANPFEVMLAQVMDELTHYETAKYGWQHLISFSNSPTTDPFHYRKPFEAQAPKYVQLNVENIQANSNVKAGMFAAYKAIDFHPRYKDYLLFDKENISKEDRQKIKELSLSQGYVKLLNAYHKIPVLVTGYGYSTARGIAQKEIDKRPLPINEKEQGQRLLEDYESFISSGSFGATINAWQDDWNARAWNTSFATNKHSQFLWGDAQVFNQGYGLLGFKNAKHHYQVDGKRGKGEWKHPLMTSATGDDLYASSDESYLYLAIKTKPEKLKEKRLLPIDITPKSGSRKMNGSKVTFSKSSDFVLSIDPNGKSELFVQERYNALKANYLRQLNGKDFYAFPPKKNSSNFEQINMVLRNTKIVEDMEKVKATERFLPTHPTGLLKTGTTDRHQKTFDSQTDISFGKDFIEVRIPWQLLNFSDPSSQRIHDDYFKHYGVKELENXEPLLXDXVLIAKKTHXXRWQIIVXKIGRDPIPKPFXK

SEQ ID NO: 278 - protein, 669 aa, Streptococcus agalactiae; identical to SEQ ID NO: 277
  VARIANT 632, 637, 639, 648, 649, 656, 668: Xaa = Any Amino Acid

SEQ ID NO: 279 - protein, 686 aa, Streptococcus agalactiae
YYFDGSLYLPKGLLKENTRTNFVVKGDTVLHKPTNKPFVVKGVDVESSLAGYHHNDFPITQKTYREWFHLISNMGANTVRVKVPMNVAFYDALYHHNKASKRPLYLLQGIRIDSYRNNASITAFNDNYRGYLKREAKGVVDILHGRKQVWNTDFGSRHYHYDLSPWVLGYVVGDDWNSGTVAYTNHQEKKTQYKGRYFKTSVAANPFEVMLAQVMDELTHYETAKYGWQHLISFSNSPTTDPFHYRKPFEAQAPKYVQLNVENIQANSNVKAGMFAAYKAIDFHPRYKDYLLFDKENISKEDRQKIKELSLSQGYVKLLNAYHKIPVLVTGYGYSTARGIAQKEIDKRPLPINEKEQGQRLLEDYESFISSGSFGATINAWQDDWNARAWNTSFATNKHNQFLWGDAQVFNQGYGLLGFKNAKHHYQVDGKRGKGEWKHPLMTSATGDDLYASSDESYLYLAIKTKPEKLKEKRLLPIDITPKSGSRKMNGSKVTFSKSSDFVLSIDPNGKSELFVQERYNALKANYLRQLNGKDFYAFPPKKNSSNFEQINMVLRNTKIVEDMEKVKATERFLPTHPTGLLKTGTTDRHQKTFDSQTDISFGKDFIEVRIPWQLLNFSDPSSQKIHDDYFKHYGVKELEIESIALGLGANSKENTLIKMADYRLKNWERPDTKTFLKDSYYVLRK

SEQ ID NO: 280 - protein, 671 aa, Streptococcus agalactiae
LPQGLLKENTRTNFVVKGDTVLHKPTNKPFVVKGVDVESSLAGYHHNDFPITQKTYREWFHLISNMGANTVRVKVPMNVAFYDALYHHNKESKRPLYLLQGIRIDSYRNNASITAFNDNYRGYLKREAKGVVDILHGRKQVWNTDFGSRHYHYDLSPWVLGYVVGDDWNSGTVAYTNHQEKKTQYKGRYFKTSVAANPFEVMLAQVMDELTHYETAKYGWQHLISFSNSPTTDPFHYRKPFEAQAPKYVQLNVENIQANSNVKAGMFAAYKAIDFHPRYKDYLLFDKENISKEDRQKIKELSLSQGYVKLLNAYHKIPVLVTGYGYSTARGIAQKEIDKRPLPINEKEQGQRLLEDYESFISSGSFGATINAWQDDWNARAWNTSFATNKHSQFLWGDAQVFNQGYGLLGFKNAKHHYQVDGKRGKGEWKHPLMTSATGDDLYASSDESYLYLAIKTKPEKLKEKRLLPIDITPKSGSRKMNGSKVTFSKSSDFVLSIDPNGKSELFVQERYNALKANYLRQLNGKDFYAFPPKKNSSNFEQINMVLRNTKIVEDMEKVKATERFLPTHPTGLLKTGTTDRHQKTFDSQPDISFGKDFIEVRIPWQLLNFSDPSSQKIHDDYFKHYGVKELEIESIALGLGANSKENTLIKMADYRLKNWERPDTKTFLKD

SEQ ID NO: 281 - protein, 174 aa, Streptococcus agalactiae
RGLLKENTRTNFVVKGDTVLHKPTNKPFVVKGVDVESSLAGYHHNDFPITQKTYREWFHLISNMGANTVRVKVPMNVAFYDALYHHNKASKRPLYLLQGIRIDSYRNNASITAFNDNYRGYLKREAKGVVDILHGRKQVWNTDFGSSHYHYDLSPWVLGYVVGDDGHSGTVALY

SEQ ID NO: 282 - protein, 665 aa, Streptococcus agalactiae
FVVKGDTVLHKPTNKPFVVKGVDVESSLAGYHHNDFPITQKTYREWFHLISNMGANTVRVKVPMNVAFYDALYHHNKASKRPLYLLQGIRIDSYRNNASITAFNDNYRGYLKREAKGVVDILHGRKQVWNTDFGSSHYHYDLSPWVLGYVVGDDWNSGTVAYTNHQEKKTQYKGRYFKTSVAANPFEVMLAQVMDELTHYETAKYGWQHLISFSNSPTTDPFHYRKPFEAQAPKYVQLNVENIQANSNVKAGMFAAYKAIDFHPRYKDYLLFDKENISKEDRQKIKELSLSQGYVKLLNAYHKIPVLVTGYGYSTARGIAQKEIDKRPLPINEKEQGQRLLEDYESFISSGSFGATINAWQDDWNARVWNTSFATNKHSQFLWGDAQVFNQGYGLLGFKNAKHHYQVDGKRGKEEWKHPLMTSATGDDLYASSDESYLYLAIKTKPEKLKEKRLLPIDITPKSGSRKMNGSKVTFSKSSDFVLSIDPNGKSELFVQERYNALKANYLRQLNGKDFYAFPPKKNSSNFEQINMVLRNTKIVEDMEKVKATERFLPTHPTGLLKTGTTDRHQKTFDSQTDISFGKDFIEVRIPWQLLNFSDPSSQKIHDDYFKHYGVKELEIESIALGLGANSKENTLIKMADYRLKNWERPDTKTFLKDSYYSIKK

SEQ ID NO: 283 - protein, 668 aa, Streptococcus agalactiae
TRTNFVVKGDTVLHKPTNKPFVVKGVDVESSLAGYHHNDFPITQKTYREWFHLISNMGANTVRVKVPMNVAFYDALYHHNKESKRPLYLLQGIRIDSYRNNASITAFNDNYRGYLKREAKGVVDILHGRKQVWNTDFGSRHYHYDLSPWVLGYVVGDDCNSGTVAYTNHQEKKTQYKGRYFKTSVAANPFEVMLAQVMDELTHYETAKYGWQHLISFSNSPTTDPFHYRKPFEAQAPKYVQLNVENIQANSNVKAGMFAAYKAIDFHPRYKDYLLFDKENISKEDRQKIKELSLSQGYVKLLNAYHKIPVLVTGYGYSTARGIAQKEIDKRPLPINEKEQGQRLLEDYESFISSGSFGATINAWQDDWNARAWNTSFATNKHSQFLWGDAQVFNQGYGLLGFKNAKHHYQVDGKRGKGEWKHPLMTSATGDDLYASSDESYLYLAIKTKPEKLKEKRLLPIDITPKSGSRKMNGSKVTFSKSSDFVLSIDPNGKSELFVQERYNALKANYLRQLNGKDFYAFPPKKNSSNFEQINMVLRNTKIVEDMEKVKATERFLPTHPTGLLKTGTTDRHQKTFDSQTDISFGKDFIEVRIPWQLLNFSDPSSQKIHDDYFKHYGVKELEIESIALGLGANSKENTLIKMADYRLKNWERPDTKTFLKDSYYSIK

SEQ ID NO: 284 - protein, 686 aa, Streptococcus agalactiae
FDGSLYLPQGLLKENTRTNFVVKGDTVLHKPTNKPFVVKGVDVESSLAGYHHNDFPITQKTYREWFHLISNMGANTVRVKVPMNVAFYDALYHHNKESKRPLYLLQGIRIDSYRNNASITAFNDNYRGYLKREAKGVVDILHGRKQVWNTDFGSRHYHYDLSPWVLGYVVGDDWNSGTVAYTNHQEKKTQYKGRYFKTSVAANPFEVMLAQVMDELTHYETAKYGWQHLISFSNSPTTDPFHYRKPFEAQAPKYVQLNVENIQANSNVKAGMFAAYKAIDFHPRYKDYLLFDKENISKEDRQKIKELSLSQGYVKLLNAYHKIPVLVTGYGYSTARGIAQKEIDKRPLPINEKEQGQRLLEDYESFISSGSFGATINAWQDDWNARAWNTSFATNKHSQFLWGDAQVFNQGYGLLGFKNAKHHYQVDGKRGKGEWKHPLMTSATGDDLYASSDESYLYLAIKTKPEKLKEKRLLPIDITPKSGSRKMNGSKVTFSKSSDFVLSIDPNGKSELFVQERYNALKANYLRQLNGKDFYAFPPKKNSSNFEQINMVLRNTKIVEDMEKVKATERFLPTHPTGLLKTGTTDRHQKTFDSQTDISFGKDFIEVRIPWQLLNFSDPSSQKIHDDYFKHYGVKELEIESIALGLGANSKENTLIKMADYRLKNWERPDTKTFLKDSYYSIKKEW

SEQ ID NO: 285 - DNA, 779 bp, Streptococcus agalactiae
aatcaagaagtttcagcaagctcaacttcaagtaaagttgttaaagttggtgttatgaccttttctgacactgaaaaagcacgttgggataaaattgaaaagctagtaggcgataaagctaaaatcaaattcacagaatttacagattatacacaaccaaatcaagcgacagccaataaggatgtggatattaatgcctttcaacattacaatttcttagaaaactggaataaggaaaataagaaaaacttaattccacttgaaaagacttacttagccccaattcgtatctattctgagaaggtaaaatctcttaaaaaattgaaaaaaggagccactattgcaattccaaatgatgcaacaaatggtagccgtgcattgtatgtccttcagtcagcaggtttaatcaaattgaatgtttctggtaagaaggttgcaacagttgctaatatcacatctaataaaaaagatattaatattcaggagttagatgcgagtcaaacaccacgtgcactcaaagatgtagatgcagctattattaataatacatacattgagcaagctaatttaaaaccttcagatgctatctttgttgagaaatcagataaaaattcaaaacaatggattaatatcattgcgggacgtaaaaattggaaaaagcaaaagaacgctaaagctatccaagctatcttggatgcttatcacacagatgaagtgaaaaaagttatcaaagatacttcagctgatattccacaatggaacccagctttcttgtacaa

SEQ ID NO: 286 - DNA, 758 bp, Streptococcus agalactiae
atcaagaagtttcagcaagctcaacttcaagtaaagttgttaaagttggtgttatgaccttttctgacactgaaaaagcacgttgggataaaattgaaaagctagtaggtgataaagctaaaatcaaatttacagaatttacagattatacacaaccaaatcaagcgacagccaataaggatgtggatattaatgcctttcaacattacaatttcttagaaaactggaataaggaaaataagaaaaacttaattccacttgaaaagacttacttagctccaattcgtatctattctgagaaggtaaaatctcttaaaaaattgaaaaaaggagccactattgcaattccaaatgatgcaacaaatggtagccgtgcattgtatgtccttcagtcagcaggtttaatcaaattgaatgtttctggtaagaaggttgcaacagttgctaatatcacatctaataaaaaggatattaatattcaggagttagatgcgagtcaaacaccacgtgcactcaaagatgtagatgcagctattattaataatacatacattgagcaagctaatttaaaaccttcagatgctatctttgttgagaaatcagataaaaattcaaaacaatggattaatatcattgcgggacgtaaaaattggaaaaagcaaaagaacgctaaagctatccaagctatcttggatgcttatcacacagatgaagtgaaaaaagttatcaaagatacttcagctgatattccacaatgg

SEQ ID NO: 287 - DNA, 754 bp, Streptococcus agalactiae
aatcaagaagtttcagcaagctcaacttcaagtaaagttgttaaagttggtgttatgaccttttctgacactgaaaaagcacgttgggataaaattgaaaagctagtaggtgataaagctaaaatcaaatttacagaatttacagattatacacaaccaaatcaagcgacagccaataaggatgtggatattaatgcctttcaacattacaatttcttagaaaactggaataaggaaaataagaaaaacttaattccacttgaaaagacttacttagctccaattcgtatctattctgagaaggtaaaatctcttaaaaaattgaaaaaaggagccactattgcaattccaaatgatgcaacaaatggtagccgtgcattgtatgtccttcagtcagcaggtttaatcaaattgaatgtttctggtaagaaggttgcaacagttgctaatatcacatctaataaaaaggatattaatattcaggagttagatgcgagtcaaacaccacgtgcactcaaagatgtagatgcagctattattaataatacatacattgagcaagctaatttaaaaccttcagatgctatctttgttgagaaatcagataaaaattcaaaacaatggattaatatcattgcgggacgtaaaaattggaaaaagcaaaagaacgctaaagctatccaagctatcttggatgcttatcacacagatgaagtgaaaaaagttatcaaagatacttcagctgatattccac

SEQ ID NO: 288 - DNA, 759 bp, Streptococcus agalactiae
aatcaagaagtttcagcaagctcaacttcaagtaaagttgttaaagttggtgttatgaccttttctgacactgaaaaagcacgttgggataaaattgaaaagctagtaggtgataaagctaaaatcaaatttacagaatttacagattatacacaaccaaatcaagcgacagccaataaggatgtggatattaatgcctttcaacattacaatttcttagaaaactggaataaggaaaataagaaaaacttaattccacttgaaaagacttacttagctccaattcgtatctattctgagaaggtaaaatctcttaaaaaattgaaaaaaggagccactattgcaattccaaatgatgcaacaaatggtagccgtgcattgtatgtccttcagtcagcaggtttaatcaaattgaatgtttctggtaagaaggttgcaacagttgctaatatcacatctaataaaaaggatattaatattcaggagttagatgccagtcaaacaccacgtgcactcaaagatgtagatgcagctattattaataatacatacattgagcaagctaatttaaaaccttcagatgctatctttgttgagaaatcagataaaaattcaaaacaatggattaatatcattgcgggacgtaaaaattggaaaaagcaaaagaacgctaaagctatccaagctatcttggatgcttatcacacagatgaagtgaaaaaagttatcaaagatacttcagctgatattccacaatgg

SEQ ID NO: 289 - DNA, 759 bp, Streptococcus agalactiae
aatcaagaagtttcagcaagctcaacttcaagtaaagttgttaaagttggtgttatgaccttttctgacactgaaaaagcacgttgggataaaattgaaaagctagtaggtgataaagctaaaatcaaatttacagaatttacagattatacacaaccaaatcaagcgacagccaataaggatgtggatattaatgcctttcaacattacaatttcttagaaaactggaataaggaaaataagaaaaacttaattccacttgaaaagacttacttagctccaattcgtatctattctgagaaggtaaaatctcttaaaaaattgaaaaaaggagccactattgcaattccaaatgatgcaacaaatggtagccgtgcattgtatgtccttcagtcagcaggtttaatcaaattgaatgtttctggtaagaaggttgcaacagttgctaatatcacatctaataaaaaggatattaatattcaggagttagatgcgagtcaaacaccacgtgcactcaaagatgtagatgcagctattattaataatacatacattgagcaagctaatttaaaaccttcagatgctatctttgttgagaaatcagataaaaattcaaaacaatggattaatatcattgcgggacgtaaaaattggaaaaagcaaaagaacgctaaagctatccaagctatcttggatgcttatcacacagatgaagtgaaaaaagttatcaaagatacttcagctgatattccacaatgg

SEQ ID NO: 290 - DNA, 732 bp, Streptococcus agalactiae
aagtaaagttgttaaagttggtgttatgaccttttctgacactgaaaaagcacgttgggataaaattgaaaagctagtaggcgataaagctaaaatcaaattcacagaatttacagattatacacaaccaaatcaagcgacagccaataaggatgtggatattaatgcctttcaacattacaatttcttagaaaactggaataaggaaaataagaaaaacttaattccacttgaaaagacttacttagccccaattcgtatctattctgagaaggtaaaatctcttaaaaaattgaaaaaaggagccactattgcaattccaaatgatgcaacaaatggtagccgtgcattgtatgtccttcagtcagcaggtttaatcaaattgaatgtttctggtaagaaggttgcaacagttgctaatatcacatctaataaaaaagatattaatattcaggagttagatgcgagtcaaacaccacgtgcactcaaagatgtagatgcagctattattaataatacatacattgagcaagctaatttaaaaccttcagatgctatctttgttgagaaatcagataaaaattcaaaacaatggattaatatcattgcgggacgtaaaaattggaaaaagcaaaagaacgctaaagctatccaagctatcttggatgcttatcacacagatgaagtgaaaaaagttatcaaagatacttcagctgatattccacaatggaa

SEQ ID NO: 291 - DNA, 751 bp, Streptococcus agalactiae
agtttcagcaagctcaacttcaagtaaagttgttaaagttggtgttatgaccttttctgacactgaaaaagcacgttgggataaaattgaaaagctagtaggtgataaagctaaaatcaaatttacagaatttacagattatacacaaccaaatcaagcgacagccaataaggatgtggatattaatgcctttcaacattacaatttcttagaaaactggaataaggaaaataagaaaaacttaattccacttgaaaagacttacttagctccaattcgtatctattctgagaaggtaaaatctcttaaaaaattgaaaaaaggagccactattgcaattccaaatgatgcaacaaatggtagccgtgcattgtatgtacttcagtcagcaggtttaatcaaattgaatgtttctggtaagaaggttgcaacagttgctaatatcacatctaataaaaaggatattaatattcaggagttagatgcgagtcaaacaccacgtgcactcaaagatgtagatgcagctattattaataatacatacattgagcaagctaatttaaaaccttcagatgctatctttgttgagaaatcagataaaaattcaaaacaatggattaatatcattgcgggacgtaaaaattggaaaaagcaaaagaacgctaaagctatccaagctatcttggatgcttatcacacagatgaagtgaaaaaagttatcaaagatacttcagctgatattccacaatgg

SEQ ID NO: 292 - DNA, 755 bp, Streptococcus agalactiae
aagaagtttcagcaagctcaacttcaagtaaagttgttaaagttggtgttatgaccttttctgacactgaaaaagcacgttgggataaaattgaaaagctagtaggtgataaagctaaaatcaaatttacagaatttacagattatacacaaccaaatcaagcgacagccaataaggatgtggatattaatgcctttcaacattacaatttcttagaaaactggaataaggaaaataagaaaaacttaattccacttgaaaagacttacttagctccaattcgtatctattctgagaaggtaaaatctcttaaaaaattgaaaaaaggagccactattgcaattccaaatgatgcaacaaatggtagccgtgcattgtatgtccttcagtcagcaggtttaatcaaattgaatgtttctggtaagaaggttgcaacagttgctaatatcacatctaataaaaaggatattaatattcaggagttagatgcgagtcaaacaccacgtgcactcaaagatgtagatgcagctattattaataatacatacattgagcaagctaatttaaaaccttcagatgctatctttgttgagaaatcagataaaaattcaaaacaatggattaatatcattgcgggacgtaaaaattggaaaaagcaaaagaacgctaaagctatccaagctatcttggatgcttatcacacagatgaagtgaaaaaagttatcaaagatacttcagctgatattccacaatgg

SEQ ID NO: 293 - DNA, 748 bp, Streptococcus agalactiae
ttcagcaagctcaacttcaagtaaagttgttaaagttggtgttatgaccttttctgacactgaaaaagcacgttgggataaaattgaaaagctagtaggtgataaagctaaaatcaaatttacagaatttacagattatacacaaccaaatcaagcgacagccaataaggatgtggatattaatgcctttcaacattacaatttcttagaaaactggaataaggaaaataagaaaaacttaattccacttgaaaagacttacttagctccaattcgtatctattctgagaaggtaaaatctcttaaaaaattgaaaaaaggagccactattgcaattccaaatgatgcaacaaatggtagccgtgcattgtatgtccttcagtcagcaggtttaatcaaattgaatgtttctggtaagaaggttgcaacagttgctaatatcacatctaataaaaaggatattaatattcaggagttagatgcgagtcaaacaccacgtgcactcaaagatgtagatgcagctattattaataatacatacattgagcaagctaatttaaaaccttcagatgctatctttgttgagaaatcagataaaaattcaaaacaatggattaatatcattgcgggacgtaaaaattggaaaaagcaaaagaacgctaaagctatccaagctatcttggatgcttatcacacagatgaagtgaaaaaagttatcaaagatacttcagctgatattccacaatgg

SEQ ID NO: 294 - DNA, 737 bp, Streptococcus agalactiae
aatcaagaagtttcagcaagctcaacttcaagtaaagttgttaaagttggtgttatgaccttttctgacactgaaaaagcacgttgggataaaattgaaaagctagtaggtgataaagctaaaatcaaatttacagaatttacagattatacacaaccaaatcaagcgacagccaataaggatgtggatattaatgcctttcaacattacaatttcttagaaaactggaataaggaaaataagaaaaacttaattccacttgaaaagacttacttagctccaattcgtatctattctgagaaggtaaaatctcttaaaaaattgaaaaaaggagccactattgcaattccaaatgatgcaacaaatggtagccgtgcattgtatgtccttcagtcagcaggtttaatcaaattgaatgtttctggtaagaaggttgcaacagttgctaatatcacatctaataaaaaggatattaatattcaggagttagatgcgagtcaaacaccacgtgcactcaaagatgtagatgcagctattattaataatacatacattgagcaagctaatttaaaaccttcagatgctatctttgttgagaaatcagataaaaattcaaaacaatggattaatatcattgcgggacgtaaaaattggaaaaagcaaaagaacgctaaagctatccaagctatcttggatgcttatcacacagatgaagtgaaaaaagttatcaaagatac

SEQ ID NO: 295 - DNA, 751 bp, Streptococcus agalactiae
agtttcagcaagctcaacttcaagtaaagttgttaaagttggtgttatgaccttttctgacactgaaaaagcacgttgggataaaattgaaaagctagtaggtgataaagctaaaatcaaatttacagaatttacagattatacacaaccaaatcaagcgacagccaataaggatgtggatattaatgcctttcaacattacaatttcttagaaaactggaataaggaaaataagaaaaacttaattccacttgaaaagacttacttagctccaattcgtatctattctgagaaggtaaaatctcttaaaaaattgaaaaaaggagccactattgcaattccaaatgatgcaacaaatggtagccgtgcattgtatgtccttcagtcagcaggtttaatcaaattgaatgtttctggtaagaaggttgcaacagttgctaatatcacatctaataaaaaggatattaatattcaggagttagatgcgagtcaaacaccacgtgcactcaaagatgtagatgcagctattattaataatacatacattgagcaagctaatttaaaaccttcagatgctatctttgttgagaaatcagataaaaattcaaaacaatggattaatatcattgcgggacgtaaaaattggaaaaagcaaaagaacgctaaagctatccaagctatctgggatgcttatcacacagatgaagtgaaaaaagttatcaaagatacttcagctgatattccacaatgg

SEQ ID NO: 296 - protein, 259 aa, Streptococcus agalactiae
NQEVSASSTSSKVVKVGVMTFSDTEKARWDKIEKLVGDKAKIKFTEFTDYTQPNQATANKDVDINAFQHYNFLENWNKENKKNLIPLEKTYLAPIRIYSEKVKSLKKLKKGATIAIPNDATNGSRALYVLQSAGLIKLNVSGKKVATVANITSNKKDINIQELDASQTPRALKDVDAAIINNTYIEQANLKPSDAIFVEKSDKNSKQWINIIAGRKNWKKQKNAKAIQAILDAYHTDEVKKVIKDTSADIPQWNPAFLY

SEQ ID NO: 297 - protein, 252 aa, Streptococcus agalactiae
QEVSASSTSSKVVKVGVMTFSDTEKARWDKIEKLVGDKAKIKFTEFTDYTQPNQATANKDVDINAFQHYNFLENWNKENKKNLIPLEKTYLAPIRIYSEKVKSLKKLKKGATIAIPNDATNGSRALYVLQSAGLIKLNVSGKKVATVANITSNKKDINIQELDASQTPRALKDVDAAIINNTYIEQANLKPSDAIFVEKSDKNSKQWINIIAGRKNWKKQKNAKAIQAILDAYHTDEVKKVIKDTSADIPQW

SEQ ID NO: 298 - protein, 251 aa, Streptococcus agalactiae
NQEVSASSTSSKVVKVGVMTFSDTEKARWDKIEKLVGDKAKIKFTEFTDYTQPNQATANKDVDINAFQHYNFLENWNKENKKNLIPLEKTYLAPIRIYSEKVKSLKKLKKGATIAIPNDATNGSRALYVLQSAGLIKLNVSGKKVATVANITSNKKDINIQELDASQTPRALKDVDAAIINNTYIEQANLKPSDAIFVEKSDKNSKQWINIIAGRKNWKKQKNAKAIQAILDAYHTDEVKKVIKDTSADIP

SEQ ID NO: 299 - protein, 253 aa, Streptococcus agalactiae
NQEVSASSTSSKVVKVGVMTFSDTEKARWDKIEKLVGDKAKIKFTEFTDYTQPNQATANKDVDINAFQHYNFLENWNKENKKNLIPLEKTYLAPIRIYSEKVKSLKKLKKGATIAIPNDATNGSRALYVLQSAGLIKLNVSGKKVATVANITSNKKDINIQELDASQTPRALKDVDAAIINNTYIEQANLKPSDAIFVEKSDKNSKQWINIIAGRKNWKKQKNAKAIQAILDAYHTDEVKKVIKDTSADIPQW

SEQ ID NO: 300 - protein, 253 aa, Streptococcus agalactiae; identical to SEQ ID NO: 299

SEQ ID NO: 301 - protein, 243 aa, Streptococcus agalactiae
SKVVKVGVMTFSDTEKARWDKIEKLVGDKAKIKFTEFTDYTQPNQATANKDVDINAFQHYNFLENWNKENKKNLIPLEKTYLAPIRIYSEKVKSLKKLKKGATIAIPNDATNGSRALYVLQSAGLIKLNVSGKKVATVANITSNKKDINIQELDASQTPRALKDVDAAIINNTYIEQANLKPSDAIFVEKSDKNSKQWINIIAGRKNWKKQKNAKAIQAILDAYHTDEVKKVIKDTSADIPQW

SEQ ID NO: 302 - protein, 250 aa, Streptococcus agalactiae
VSASSTSSKVVKVGVMTFSDTEKARWDKIEKLVGDKAKIKFTEFTDYTQPNQATANKDVDINAFQHYNFLENWNKENKKNLIPLEKTYLAPIRIYSEKVKSLKKLKKGATIAIPNDATNGSRALYVLQSAGLIKLNVSGKKVATVANITSNKKDINIQELDASQTPRALKDVDAAIINNTYIEQANLKPSDAIFVEKSDKNSKQWINIIAGRKNWKKQKNAKAIQAILDAYHTDEVKKVIKDTSADIPQW

SEQ ID NO: 303 - protein, 251 aa, Streptococcus agalactiae
EVSASSTSSKVVKVGVMTFSDTEKARWDKIEKLVGDKAKIKFTEFTDYTQPNQATANKDVDINAFQHYNFLENWNKENKKNLIPLEKTYLAPIRIYSEKVKSLKKLKKGATIAIPNDATNGSRALYVLQSAGLIKLNVSGKKVATVANITSNKKDINIQELDASQTPRALKDVDAAIINNTYIEQANLKPSDAIFVEKSDKNSKQWINIIAGRKNWKKQKNAKAIQAILDAYHTDEVKKVIKDTSADIPQW

SEQ ID NO: 304 - protein, 249 aa, Streptococcus agalactiae
SASSTSSKVVKVGVMTFSDTEKARWDKIEKLVGDKAKIKFTEFTDYTQPNQATANKDVDINAFQHYNFLENWNKENKKNLIPLEKTYLAPIRIYSEKVKSLKKLKKGATIAIPNDATNGSRALYVLQSAGLIKLNVSGKKVATVANITSNKKDINIQELDASQTPRALKDVDAAIINNTYIEQANLKPSDAIFVEKSDKNSKQWINIIAGRKNWKKQKNAKAIQAILDAYHTDEVKKVIKDTSADIPQW

SEQ ID NO: 305 - protein, 245 aa, Streptococcus agalactiae
NQEVSASSTSSKVVKVGVMTFSDTEKARWDKIEKLVGDKAKIKFTEFTDYTQPNQATANKDVDINAFQHYNFLENWNKENKKNLIPLEKTYLAPIRIYSEKVKSLKKLKKGATIAIPNDATNGSRALYVLQSAGLIKLNVSGKKVATVANITSNKKDINIQELDASQTPRALKDVDAAIINNTYIEQANLKPSDAIFVEKSDKNSKQWINIIAGRKNWKKQKNAKAIQAILDAYHTDEVKKVIKD

SEQ ID NO: 306 - protein, 250 aa, Streptococcus agalactiae
VSASSTSSKVVKVGVMTFSDTEKARWDKIEKLVGDKAKIKFTEFTDYTQPNQATANKDVDINAFQHYNFLENWNKENKKNLIPLEKTYLAPIRIYSEKVKSLKKLKKGATIAIPNDATNGSRALYVLQSAGLIKLNVSGKKVATVANITSNKKDINIQELDASQTPRALKDVDAAIINNTYIEQANLKPSDAIFVEKSDKNSKQWINIIAGRKNWKKQKNAKAIQAIWDAYHTDEVKKVIKDTSADIPQW

SEQ ID NO: 307 - DNA, 588 bp, Streptococcus agalactiae
aaaagttcacaagttactactgaatctttgtcaaaagcagataaagttcgcgtagccaaaaaatcaaaaatgactaaggcgacatctaaatcaaaagtagaagatgtaaaacaggctccaaaaccttctcaggcatctaatgaagtcccaaaatcaagttctcaatctacagaagctaattctcagcaacaagttactgcgagtgaagaggcggctgtagaacaagcagttgtaacagaaaatacccctgctaccagtcaggcacaacaaacttatgctgttactgagacaacttacaaacctgctcaacaccagacaagtggccaagtattgagcaatggaaatactgcaggggcggtcggatctgctgctgcagcacaaatggctgctgcaacaggagtccctcagtctacttgggaacatattattgcccgtgaatcaaatggtaatcctaatgttgctaatgcctcaggagcttcaggacttttccaaacgatgccaggttggggttcaacagctacagttcaggatcaagttaattcagctattaaagcttatcgtgctcaaggtttatcagcttggggttac

SEQ ID NO: 308 - DNA, 588 bp, Streptococcus agalactiae
aaaagttcacaagttactactgaatctttgtcaaaagcagataaagttcgcgtagccaaaaaatcaaaaatgactaaggcgacatctaaatcaaaagtagaagatgtaaaacaggctccaaaaccttctcaggcatctaatgaagccccaaaatcaagttctcaatctacagaagctaattctcagcaacaagttactgcgagtgaagaggcagctgtagaacaagcagttgtaacagaaaacacccctgctaccagtcaggcacaacaagcttatgctgttactgagacaacttatagacctgctcaacaccagacgagtggccaagtattgagtaatggaaatactgcaggggctattggctcagcagctgcagcacaaatggctgctgcaacaggagtccctcagtctacttgggaacatattattgcccgtgaatcaaatggtaatcctaatgttgctaatgcctcaggagcttcaggacttttccaaacgatgccaggttggggttcaacagctacagttcaggatcaagttaattcagctattaaagcttatcgtgctcaaggtttatcagcttggggttac

SEQ ID NO: 309 - DNA, 588 bp, Streptococcus agalactiae; identical to SEQ ID NO: 308

SEQ ID NO: 310 - DNA, 478 bp, Streptococcus agalactiae
tagccaaaaaatcaaaaatgattaaggcgacatctaaatcaaaagtagaagatgtaaaacaggctccaaaaccttctcaggcatctaatgaagccccaaaatcaagttctcaatctacagaagctaattctcagcaacaagttactgcgagtgaagaggcagctgtagaacaagcagttgtaacagaaaacacccctgctaccagtcaggcacaacaagcttatgctgttactgagacaacttatagacctgctcaacaccagacgagtggccaagtattgagtaatggaaatactgcaggggctattggctcagcagctgcagcacaaatggctgctgcaacaggagtccctcagtctacttgggaacatattattgcccgtgaatcaaatggtaatcctaatgttgctaatgcctcaggagcttcaggacttttccaaacgatgccaggttggggttcaacagctacagttcagga

SEQ ID NO: 311 - DNA, 501 bp, Streptococcus agalactiae
aaggcgacatctaaatcaaaagtagaagatgtaaaacaggctccaaaaccttctcaggcatctaatgaagccccaaaatcaagttctcaatctacagaagctaattctcagcaacaagttactgcgagtgaagaggcagctgtagaacaagcagttgtaacagaaaacacccctgctaccagtcaggcacaacaagcttatgctgttactgagacaacttatagacctgctcaacaccagacaagtggccaagtattgagtaatggaaatactgcaggggctattggctcagcagctgcagcacaaatggctgctgcaacaggagtccctcagtctacttgggaacatattattgcccgtgaatcaaatggtaatcctaatgttgctaatgcctcaggagcttcaggacttttccaaacgatgccaggttggggttcaacagctacagttcagaatcaagttaattcagctattaaagcttatcgtgctcaaggtttatca

SEQ ID NO: 312 - DNA, 566 bp, Streptococcus agalactiae
aatctttgtcaaaagcagataaagttcgcgtagccaaaaaatcaaaaatgactaaggcgacatctaaatcaaaagtagaagatgtaaaacaggctccaaaaccttctcaggcatctaatgaagccccaaaatcaagttctcaatctacagaagctaattctcagcaacaagttactgcgagtgaagaggcagctgtagaacaagcagttgtaacagaaaacacccctgctaccagtcaggcacaacaagcttatgctgttactgagacaacttatagacctgctcaacaccagacgagtggccaagtattgagtaatggaaatactgcaggggctattggctcagcagctgcagcacaaatggctgctgcaacaggagtccctcagtctacttgggaacatattattgcccgtgaatcaaatggtaatcctaatgttgctaatgcctcaggagcttcaggacttttccaaacgatgccaggttggggttcaacagctacagttcaggatcaagttaattcagctattaaagcttatcgtgctcaaggtttatcagcttggggttac

SEQ ID NO: 313 - DNA, 588 bp, Streptococcus agalactiae
aaaagttcacaagttactactgaatctttgtcaaaagcagataaagttcgcgtagccaaaaaatcaaaaatgactaaggcgacatctaaatcaaaagtagaagatgtaaaacaggctccaaaaccttctcaggcatctaatgaagccccaaaatcaagttctcaatctacagaagctaattctcagcaacaagttactgcgagtgaagaggcggctgtagaacaagcagttgtaacagaaaatacccctgctaccagtcaggcacaacaaacttatgctgttactgagacaacttacaaacctgctcaacaccagacaagtggccaagtattgagcaatggaaatactgcaggggcggtcggatctgctgctgcagcacaaatggctgctgcaacaggagtccctcagtctacttgggaacatattattgcccgtgaatcaaatggtaatcctaatgttgctaatgcctcaggagcttcaggacttttccaaacgatgccaggttggggttcaacagctacagttcaggatcaagttaattcagctattaaagcttatcgtgctcaaggtttatcagcttggggttac

SEQ ID NO: 314 - DNA, 556 bp, Streptococcus agalactiae
aaaagttcacaagttactactgaatctttgtcaaaagcagataaagttcgcgtagccaaaaaatcaaaaatgactaaggcgacatctaaatcaaaagtagaagatgtaaaacaggctccaaaaccttctcaggcatctaatgaagccccaaaatcaagttctcaatctacagaagctaattctcagcaacaagttactgcgagtgaagaggcagctgtagaacaagcagttgtaacagaaaacacccctgctaccagtcaggcacaacaagcttatgctgttactgagacaacttatagacctgctcaacaccagacaagtggccaagtattgagtaatggaaatactgcaggggctattggctcagcagctgcagcacaaatggctgctgcaacaggagtccctcagtctacttgggaacatattattgcccgtgaatcaaatggtaatcctaatgttgctaatgcctcaggagcttcaggacttttccaaacgatgccaggttggggttcaacagctacagttcaggatcaagttaattcagctattaaagctt

SEQ ID NO: 315 - DNA, 587 bp, Streptococcus agalactiae
aaaagttcacaagttactactgaatctttgtcaaaagcagataaagttcgcgtagccaaaaaatcaaaaatgactaaggcgacatctaaatcaaaagtagaagatgtaaaacaggctccaaaaccttctcaggcatctaatgaagccccaaaatcaagttctcaatctacagaagctaattctcagcaacaagttactgcgagtgaagaggcggctgtagaacaagcagttgtaacagaaaatacccctgctaccagtcaggcacaacaaacttatgctgttactgagacaacttacaaacctgctcaacaccagacaagtggccaagtattgagcaatggaaatactgcaggggcggtcggatctgctgctgcagcacaaatggctgctgcaacaggagtccctcagtctacttgggaacatattattgcccgtgaatcaaatggtaatcctaatgttgctaatgcctcaggagcttcaggacttttccaaacgatgccaggttggggttcaacagctacagttcaggatcaagttaattcagctattaaagcttatcgtgctcaaggtttatcagcttggggtta

SEQ ID NO: 316 - DNA, 564 bp, Streptococcus agalactiae
gtaaccccaagctgataaaccttgagcacgataagctttaatagctgaattaacttgatcctgaactgtagctgttgaaccccaacctggcatcgtttggaaaagtcctgaagctcctgaggcattagcaacattaggattaccatttgattcacgggcaataatatgttcccaagtagactgagggactcctgttgcagcagccatttgtgctgcagcagcagatccgaccgcccctgcagtatttccattgctcaatacttggccacttgtctggtgttgagcaggtttgtaagttgtctcagtaacagcataagtttgttgtgcctgactggtagcaggggtattttctgttacaactgcttgttctacagccgcctcttcactcgcagtaacttgttgctgagaattagcttctgtagattgagaacttgattttggggcttcattagatgcctgagaaggttttggagcctgttttacatcttctacttttgatttagatgtcgccttagtcatttttgattttttggctacgcgaactttatctgcttttgacaaaga

SEQ ID NO: 317 - protein, 196 aa, Streptococcus agalactiae
KSSQVTTESLSKADKVRVAKKSKMTKATSKSKVEDVKQAPKPSQASNEVPKSSSQSTEANSQQQVTASEEAAVEQAVVTENTPATSQAQQTYAVTETTYKPAQHQTSGQVLSNGNTAGAVGSAAAAQMAAATGVPQSTWEHIIARESNGNPNVANASGASGLFQTMPGWGSTATVQDQVNSAIKAYRAQGLSAWGY

SEQ ID NO: 318 - protein, 196 aa, Streptococcus agalactiae
KSSQVTTESLSKADKVRVAKKSKMTKATSKSKVEDVKQAPKPSQASNEAPKSSSQSTEANSQQQVTASEEAAVEQAVVTENTPATSQAQQAYAVTETTYRPAQHQTSGQVLSNGNTAGAIGSAAAAQMAAATGVPQSTWEHIIARESNGNPNVANASGASGLFQTMPGWGSTATVQDQVNSAIKAYRAQGLSAWGY

SEQ ID NO: 319 - protein, 196 aa, Streptococcus agalactiae; identical to SEQ ID NO: 318

SEQ ID NO: 320 - protein, 158 aa, Streptococcus agalactiae
AKKSKMIKATSKSKVEDVKQAPKPSQASNEAPKSSSQSTEANSQQQVTASEEAAVEQAVVTENTPATSQAQQAYAVTETTYRPAQHQTSGQVLSNGNTAGAIGSAAAAQMAAATGVPQSTWEHIIARESNGNPNVANASGASGLFQTMPGWGSTATVQ

SEQ ID NO: 321 - protein, 167 aa, Streptococcus agalactiae
KATSKSKVEDVKQAPKPSQASNEAPKSSSQSTEANSQQQVTASEEAAVEQAVVTENTPATSQAQQAYAVTETTYRPAQHQTSGQVLSNGNTAGAIGSAAAAQMAAATGVPQSTWEHIIARESNGNPNVANASGASGLFQTMPGWGSTATVQNQVNSAIKAYRAQGLS

SEQ ID NO: 322 - protein, 188 aa, Streptococcus agalactiae
SLSKADKVRVAKKSKMTKATSKSKVEDVKQAPKPSQASNEAPKSSSQSTEANSQQQVTASEEAAVEQAVVTENTPATSQAQQAYAVTETTYRPAQHQTSGQVLSNGNTAGAIGSAAAAQMAAATGVPQSTWEHIIARESNGNPNVANASGASGLFQTMPGWGSTATVQDQVNSAIKAYRAQGLSAWGY

SEQ ID NO: 323 - protein, 196 aa, Streptococcus agalactiae
KSSQVTTESLSKADKVRVAKKSKMTKATSKSKVEDVKQAPKPSQASNEAPKSSSQSTEANSQQQVTASEEAAVEQAVVTENTPATSQAQQTYAVTETTYKPAQHQTSGQVLSNGNTAGAVGSAAAAQMAAATGVPQSTWEHIIARESNGNPNVANASGASGLFQTMPGWGSTATVQDQVNSAIKAYRAQGLSAWGY

SEQ ID NO: 324 - protein, 185 aa, Streptococcus agalactiae
KSSQVTTESLSKADKVRVAKKSKMTKATSKSKVEDVKQAPKPSQASNEAPKSSSQSTEANSQQQVTASEEAAVEQAVVTENTPATSQAQQAYAVTETTYRPAQHQTSGQVLSNGNTAGAIGSAAAAQMAAATGVPQSTWEHIIARESNGNPNVANASGASGLFQTMPGWGSTATVQDQVNSAIKA

SEQ ID NO: 325 - protein, 195 aa, Streptococcus agalactiae
KSSQVTTESLSKADKVRVAKKSKMTKATSKSKVEDVKQAPKPSQASNEAPKSSSQSTEANSQQQVTASEEAAVEQAVVTENTPATSQAQQTYAVTETTYKPAQHQTSGQVLSNGNTAGAVGSAAAAQMAAATGVPQSTWEHIIARESNGNPNVANASGASGLFQTMPGWGSTATVQDQVNSAIKAYRAQGLSAWG

SEQ ID NO: 326 - protein, 188 aa, Streptococcus agalactiae
SLSKADKVRVAKKSKMTKATSKSKVEDVKQAPKPSQASNEAPKSSSQSTEANSQQQVTASEEAAVEQAVVTENTPATSQAQQTYAVTETTYKPAQHQTSGQVLSNGNTAGAVGSAAAAQMAAATGVPQSTWEHIIARESNGNPNVANASGASGLFQTMPGWGSTATVQDQVNSAIKAYRAQGLSAWGY

SEQ ID NO: 327 - DNA, 438 bp, Streptococcus agalactiae
gcatcttataccgtgaaatcaggtgataccttatcagctattgctaaaaatcataaaactacggtacaagagttagtgtctctcaatagtatcagtaacgctgatgtcatcagtataggtgatgttttaaaattggataattctacagctagtcaagcagaagcaaaatctcaaccaacaattgaaaattcaatgaattcttcatcaaatttgagttcaagtgattcagctgcaaaagaagaaatagctcgtcgtgaatcaaatggtagttatactgcacagaatggacaatattatggaagatatcaactgtctcaatcttacctaaatggcgacttatctcctgaaaatcaagaaaaagtagcggacaattatgtggcttctcgttacggatcttggtcggcagcgctatcattttggaatagtaacggctggtat

SEQ ID NO: 328 - DNA, 438 bp, Streptococcus agalactiae
gcatcttataccgtgaaatcaggtgataccttatcagctattgctaaaaatcataaaactacggtacaagagttagtgtctctcaatagtatcagtaacgctgatgtcatcagtataggtgatgttttaaaattggataattctacagctagtcaagcagaagcaaaatctcaaccaacaattgaaaattcaatgaattcttcatcaaatttgagttcaagtgattcagccgcaaaagaagaaatagctcgtcgtgaatcaaatggtagttatactgcacagaatggacaatattatggaagatatcaactgtctcaatcttacctaaatggcgacttatctcctgaaaatcaagaaaaagtagcggacaattatgtggtttctcgttacggatcttggtcggcagcgctatcattttggaatagtaacggctggtat

SEQ ID NO: 329 - DNA, 438 bp, Streptococcus agalactiae; identical to SEQ ID NO: 328

SEQ ID NO: 330 - DNA, 438 bp, Streptococcus agalactiae
gcatcttataccgtgaaatcaggtgataccttatcagctattgctaaaaatcataaaactacggtacaagagttagtgtctctcaatagtatcagtaacgctgatgtcatcagtataggtgatgttttaaaattggataattctaaagctagtcaagcagaagcaaaatctcaaccaacaattgaaaattcaatgaattcttcatcaaatttgagttcaagtgattcagccgcaaaagaagaaatagctcgtcgtgaatcaaatggtagttatactgcacagaatggacaatattatggaagatatcaactgtctcaatcttacctaaatggcgacttatctcctgaaaatcaagaaaaagtagcggacaattatgtggtttctcgttacggatcttggtcggcagcgctatcattttggaatagtaacggctggtat

SEQ ID NO: 331 - DNA, 438 bp, Streptococcus agalactiae
gcatcttataccgtgaaatcaggtgataccttatcagctattgctaaaaatcataaaactacggtacaagagttagtgtctctcaatagtatcagtaacgctgatgtcatcagtataggtgatgttttaaaattggataattctacagctagtcaagcagaagcaaaatctcaaccaacaattgaaaattcaatgaattcttcatcaaatttgagttcaagtgattcagccgcaaaagaagaaatagctcgtcgtgaatcaaatggtagttatactgcacagaatggacaatattatggaagatatcaactgtctcaatcttacctaaatggcgacttatctcctgaaaatcaagaaaaagtagcggacaattatgtggcttctcgttacggatcttggtcggcagcgctatcattttggaatagtaacggctggtat

SEQ ID NO: 332 - DNA, 438 bp, Streptococcus agalactiae; identical to SEQ ID NO: 330

SEQ ID NO: 333 - DNA, 438 bp, Streptococcus agalactiae
gcatcttataccgtgaaatcaggtgataccttatcagctattgctaaaaatcataaaactacggtacaatagttagtgtctctcaatagtatcagtaacgctgatgtcatcagtataggtgatgttttaaaattggataattctacagctagtcaagcagaagcaaaatctcaaccaacaattgaaaattcaatgaattcttcatcaaatttgagttcaagtgattcagctgcaaaagaagaaatagctcgtcgtgaatcaaatggtagttatactgcacagaatggacaatattatggaagatatcaactgtctcaatcttacctaaatggcgacttatctcctgaaaatcaagaaaaagtagcggacaattatgtggcttctcgttacggatcttggtcggcagcgctatcattttggaatagtaacggctggtat

SEQ ID NO: 334 - DNA, 438 bp, Streptococcus agalactiae; identical to SEQ ID NO: 331

SEQ ID NO: 335 - DNA, 438 bp, Streptococcus agalactiae
gcatcttataccgtgaaatcaggtgataccttatcagctattgctaaaaatcataaaactacggtacaagagttagtgtctctcaatagtatcagtaacgctgacgtcatcagtataggtgatgttttaaaattggataattctacaactagtcaagcagaagcaaaatctcaaccaacaattgaaaattcaatgaattcttcatcaaatttgagttcaagtgattcagccgcaaaagaagaaatagctcgtcgtgaatcaaatggtagttatactgcacagaatggacaatattatggaagatatcaactgtctcaatcttacctaaatggcgacttatctcctgaaaatcaagaaaaagtagcggacaattatgtggcttctcgttacggatcttggtcggcagcgctatcattttggaatagtaacggctggtat

SEQ ID NO: 336 - DNA, 438 bp, Streptococcus agalactiae; identical to SEQ ID NO: 333

SEQ ID NO: 337 - DNA, 438 bp, Streptococcus agalactiae; identical to SEQ ID NO: 333

SEQ ID NO: 338 - protein, 146 aa, Streptococcus agalactiae
ASYTVKSGDTLSAIAKNHKTTVQELVSLNSISNADVISIGDVLKLDNSTASQAEAKSQPTIENSMNSSSNLSSSDSAAKEEIARRESNGSYTAQNGQYYGRYQLSQSYLNGDLSPENQEKVADNYVASRYGSWSAALSFWNSNGWY

SEQ ID NO: 339 - protein, 146 aa, Streptococcus agalactiae
ASYTVKSGDTLSAIAKNHKTTVQELVSLNSISNADVISIGDVLKLDNSTASQAEAKSQPTIENSMNSSSNLSSSDSAAKEEIARRESNGSYTAQNGQYYGRYQLSQSYLNGDLSPENQEKVADNYVVSRYGSWSAALSFWNSNGWY

SEQ ID NO: 340 - protein, 146 aa, Streptococcus agalactiae; identical to SEQ ID NO: 339

SEQ ID NO: 341 - protein, 146 aa, Streptococcus agalactiae
ASYTVKSGDTLSAIAKNHKTTVQELVSLNSISNADVISIGDVLKLDNSKASQAEAKSQPTIENSMNSSSNLSSSDSAAKEEIARRESNGSYTAQNGQYYGRYQLSQSYLNGDLSPENQEKVADNYVVSRYGSWSAALSFWNSNGWY

SEQ ID NO: 342 - protein, 146 aa, Streptococcus agalactiae; identical to SEQ ID NO: 338

SEQ ID NO: 343 - protein, 146 aa, Streptococcus agalactiae; identical to SEQ ID NO: 341

SEQ ID NO: 344 - protein, 146 aa, Streptococcus agalactiae
  VARIANT 24: Xaa = Any Amino Acid
ASYTVKSGDTLSAIAKNHKTTVQXLVSLNSISNADVISIGDVLKLDNSTASQAEAKSQPTIENSMNSSSNLSSSDSAAKEEIARRESNGSYTAQNGQYYGRYQLSQSYLNGDLSPENQEKVADNYVASRYGSWSAALSFWNSNGWY

SEQ ID NO: 345 - protein, 146 aa, Streptococcus agalactiae; identical to SEQ ID NO: 338

SEQ ID NO: 346 - protein, 146 aa, Streptococcus agalactiae
ASYTVKSGDTLSAIAKNHKTTVQELVSLNSISNADVISIGDVLKLDNSTTSQAEAKSQPTIENSMNSSSNLSSSDSAAKEEIARRESNGSYTAQNGQYYGRYQLSQSYLNGDLSPENQEKVADNYVASRYGSWSAALSFWNSNGWY

SEQ ID NO: 347 - protein, 146 aa, Streptococcus agalactiae; identical to SEQ ID NO: 344
  VARIANT 24: Xaa = Any Amino Acid

SEQ ID NO: 348 - protein, 146 aa, Streptococcus agalactiae; identical to SEQ ID NO: 344
  VARIANT 24: Xaa = Any Amino Acid

SEQ ID NO: 349 - DNA, 735 bp, Streptococcus agalactiae
atgaagaaagtgttagtgagtagtcttttggttttagggattacgataacgttacaaacagtagttgaggctaaggggccaaaagtagcttatacacaagagggaatgactgctctttcggacacaaataaagataaagtcactactatttctattgacgagattcaaaaaagcttagaaggtaagaagccgattactgttagttttgatattgatgatacactgcttttcagtagtcaatattttcaatatggtaaagaatatgtaactcctggatcgtttgattttcttcataaacaaaaattctgggatcttgttgcaaaacgaggagatcaagattccattcccaaagaatatgctaaaaaattaattgctatgcatcaaaaacgaggagataaaattgtttttataacaggtaggacaagagggtcaatgtataaggagggcgaggttgataaaacagctaaagccttagctaaagattttaaattagacaaaccaattgctgtaaattatacaggcgataaacctaaaaagccatacaaatatgataaatcatattatattaagaaatatggttcagacattcattatggagatagtgatgacgatattcatgcagctagggaggccggtgctagaccaattagaattttaagagcacctaattctacaaatctacctttaccagaagctggaggctacggtgaagaggttctcgaaaattcagcttac

SEQ ID NO: 350 - DNA, 663 bp, Streptococcus agalactiae
aaggggccaaaagtagcttatacacaagagggaatgactgctctttcggacacaaataaagataaagtcactactatttctattgacgagattcaaaaaagcttagaaggtaagaagccgattactgttagttttgatattgatgatacactacttttcagtagtcaatattttcaatatggtaaagaatatgtaactcctggatcgtttgattttcttcataaacaaaaattctgggatcttgttgcaaaacgaggagatcaagattccattcccaaagaatatgctaaaaaattaattgctatgcatcaaaaacgaggagataaaattgtttttataacaggtaggacaagagggtcaatgtataaggagggcgaggttgataaaacagctaaagccttagctaaagattttaaattagacaaaccaattgctgtaaattatacaggcgataaacctaaaaagccatacaaatatgataaatcatattatattaagaaatatggttcagacattcattatggagatagtgatgacgatattcatgcagctagggaggccggtgctagaccaattagaattttaagagcacctaattctacaaatctacctttaccagaagctggaggctacggtgaagaggttctcgaaaattcagcttac

SEQ ID NO: 351 - DNA, 663 bp, Streptococcus agalactiae
aaggggccaaaagtagcttatacacaagagggaatgactgctctttcggacacaaataaagataaagtcactactatttctattgacgagattcaaaaaagcttagaaggtaagaagccgattactgttagttttgatattgatgatacactgcttttcagtagtcaatattttcaatatggtaaagaatatgtaactcctggatcgtttgattttcttcataaacaaaaattctgggatcttgttgcaaaacgaggagatcaagattccattcccaaagaatatgctaaaaaattaattgctatgcatcaaaaacgaggagataaaattgtttttataacaggtaggacaagagggtcaatgtataaggagggcgaggttgataaaacagctaaagccttagctaaagattttaaattagacaaaccaattgctgtaaattatacaggcgataaacctaaaaagccatacaaatatgataaatcatattatattaagaaatatggttcagacattcattatggagatagtgatgacgatattcatgcagctagggaggccggtgctagaccaattagaattttaagagcacctaattctacaaatctacctttaccagaagctggaggctacggtgaagaggttctcgaaaattcagcttac

SEQ ID NO: 352 - DNA, 663 bp, Streptococcus agalactiae; identical to SEQ ID NO: 351

SEQ ID NO: 353 - DNA, 663 bp, Streptococcus agalactiae; identical to SEQ ID NO: 351

SEQ ID NO: 354 - DNA, 663 bp, Streptococcus agalactiae; identical to SEQ ID NO: 351

SEQ ID NO: 355 - DNA, 663 bp, Streptococcus agalactiae; identical to SEQ ID NO: 351

SEQ ID NO: 356 - DNA, 663 bp, Streptococcus agalactiae; identical to SEQ ID NO: 351

SEQ ID NO: 357 - DNA, 663 bp, Streptococcus agalactiae; identical to SEQ ID NO: 351

SEQ ID NO: 358 - protein, 221 aa, Streptococcus agalactiae
KGPKVAYTQEGMTALSDTNKDKVTTISIDEIQKSLEGKKPITVSFDIDDTLLFSSQYFQYGKEYVTPGSFDFLHKQKFWDLVAKRGDQDSIPKEYAKKLIAMHQKRGDKIVFITGRTRGSMYKEGEVDKTAKALAKDFKLDKPIAVNYTGDKPKKPYKYDKSYYIKKYGSDIHYGDSDDDIHAAREAGARPIRILRAPNSTNLPLPEAGGYGEEVLENSAY

SEQ ID NO: 359 - protein, 221 aa, Streptococcus agalactiae; identical to SEQ ID NO: 358

SEQ ID NO: 360 - protein, 221 aa, Streptococcus agalactiae; identical to SEQ ID NO: 358

SEQ ID NO: 361 - protein, 221 aa, Streptococcus agalactiae; identical to SEQ ID NO: 358

SEQ ID NO: 362 - protein, 221 aa, Streptococcus agalactiae; identical to SEQ ID NO: 358

SEQ ID NO: 363 - protein, 221 aa, Streptococcus agalactiae; identical to SEQ ID NO: 358

SEQ ID NO: 364 - protein, 221 aa, Streptococcus agalactiae; identical to SEQ ID NO: 358

SEQ ID NO: 365 - protein, 221 aa, Streptococcus agalactiae; identical to SEQ ID NO: 358

SEQ ID NO: 366 - protein, 221 aa, Streptococcus agalactiae; identical to SEQ ID NO: 358

SEQ ID NO: 367 - DNA, 2670 bp, Streptococcus agalactiae
atgaaaaagagacaaaaaatatggagagggttatcagttactttactaatcctgtcccaaattccatttggtatattggtacaaggtgaaacccaagataccaatcaagcacttggaaaagtaattgttaaaaaaacgggagacaatgctacaccattaggcaaagcgacttttgtgttaaaaaatgacaatgataagtcagaaacaagtcacgaaacggtagagggttctggagaagcaacctttgaaaacataaaacctggagactacacattaagagaagaaacagcaccaattggttataaaaaaactgataaaacctggaaagttaaagttgcagataacggagcaacaataatcgagggtatggatgcagataaagcagagaaacgaaaagaagttttgaatgcccaatatccaaaatcagctatttatgaggatacaaaagaaaattacccattagttaatgtagagggttccaaagttggtgaacaatacaaagcattgaatccaataaatggaaaagatggtcgaagagagattgctgaaggttggttatcaaaaaaaattacaggggtcaatgatctcgataagaataaatataaaattgaattaactgttgagggtaaaaccactgttgaaacgaaagaacttaatcaaccactagatgtcgttgtgctattagataattcaaatagtatgaataatgaaagagccaataattctcaaagagcattaaaagctggggaagcagttgaaaagctgattgataaaattacatcaaataaagacaatagagtagctcttgtgacatatgcctcaaccatttttgatggtactgaagcgaccgtatcaaagggagttgccgatcaaaatggtaaagcgctgaatgatagtgtatcatgggattatcataaaactacttttacagcaactacacataattacagttatttaaatttaacaaatgatgctaacgaagttaatattctaaagtcaagaattccaaaggaagcggagcatataaatggggatcgcacgctctatcaatttggtgcgacatttactcaaaaagctctaatgaaagcaaatgaaattttagagacacaaagttctaatgctagaaaaaaacttatttttcacgtaactgatggtgtccctacgatgtcttatgccataaattttaatccttatatatcaacatcttaccaaaaccagtttaattcttttttaaataaaataccagatagaagtggtattctccaagaggattttataatcaatggtgatgattatcaaatagtaaaaggagatggagagagttttaaactgttttcggatagaaaagttcctgttactggaggaacgacacaagcagcttatcgagtaccgcaaaatcaactctctgtaatgagtaatgagggatatgcaattaatagtggatatatttatctctattggagagattacaactgggtctatccatttgatcctaagacaaagaaagtttctgcaacgaaacaaatcaaaactcatggtgagccaacaacattatactttaatggaaatataagacctaaaggttatgacatttttactgttgggattggtgtaaacggagatcctggtgcaactcctcttgaagctgagaaatttatgcaatcaatatcaagtaaaacagaaaattatactaatgttgatgatacaaataaaatttatgatgagctaaataaatactttaaaacaattgttgaggaaaaacattctattgttgatggaaatgtgactgatcctatgggagagatgattgaattccaattaaaaaatggtcaaagttttacacatgatgattacgttttggttggaaatgatggcagtcaattaaaaaatggtgtggctcttggtggaccaaacagtgatgggggaattttaaaagatgttacagtgacttatgataagacatctcaaaccatcaaaatcaatcatttgaacttaggaagtggacaaaaagtagttcttacctatgatgtacgtttaaaagataactatataagtaacaaattttacaatacaaataatcgtacaacgctaagtccgaagagtgaaaaagaaccaaatactattcgtgatttcccaattcccaaaattcgtgatgttcgtgagtttccggtactaaccatcagtaatcagaagaaaatgggtgaggttgaatttattaaagttaataaagacaaacattcagaatcgcttttgggagctaagtttcaacttcagatagaaaaagatttttctgggtataagcaatttgttccagagggaagtgatgttacaacaaagaatgatggtaaaatttattttaaagcacttcaagatggtaactataaattatatgaaatttcaagtccagatggctatatagaggttaaaacgaaacctgttgtgacatttacaattcaaaatggagaagttacgaacctgaaagcagatccaaatgctaataaaaatcaaatcgggtatcttgaaggaaatggtaaacatcttattaccaacactcccaaacgcccaccaggtgtttttcctaaaacagggggaattggtacaattgtctatatattagttggttctacttttatgatacttaccatttgttctttccgtcgtaaacaattg

SEQ ID NO: 368 - DNA, 2490 bp, Streptococcus agalactiae
ggtgaaacccaagataccaatcaagcacttggaaaagtaattgttaaaaaaacgggagacaatgctacaccattaggcaaagcgacttttgtgttaaaaaatgacaatgataagtcagaaacaagtcacgaaacggtagagggttctggagaagcaacctttgaaaacataaaacctggagactacacattaagagaagaaacagcaccaattggttataaaaaaactgataaaacctggaaagttaaagttgcagataacggagcaacaataatcgagggtatggatgcagataaagcagagaaacgaaaagaagttttgaatgcccaatatccaaaatcagctatttatgaggatacaaaagaaaattacccattagttaatgtagagggttccaaagttggtgaacaatacaaagcattgaatccaataaatggaaaagatggtcgaagagagattgctgaaggttggttatcaaaaaaaattacaggggtcaatgatctcgataagaataaatataaaattgaattaactgttgagggtaaaaccactgttgaaacgaaagaacttaatcaaccactagatgtcgttgtgctattagataattcaaatagtatgaataatgaaagagccaataattctcaaagagcattaaaagctggggaagcagttgaaaagctgattgataaaattacatcaaataaagacaatagagtagctcttgtgacatatgcctcaaccatttttgatggtactgaagcgaccgtatcaaagggagttgccgatcaaaatggtaaagcgctgaatgatagtgtatcatgggattatcataaaactacttttacagcaactacacataattacagttatttaaatttaacaaatgatgctaacgaagttaatattctaaagtcaagaattccaaaggaagcggagcatataaatggggatcgcacgctctatcaatttggtgcgacatttactcaaaaagctctaatgaaagcaaatgaaattttagagacacaaagttctaatgctagaaaaaaacttatttttcacgtaactgatggtgtccctacgatgtcttatgccataaattttaatccttatatatcaacatcttaccaaaaccagtttaattcttttttaaataaaataccagatagaagtggtattctccaagaggattttataatcaatggtgatgattatcaaatagtaaaaggagatggagagagttttaaactgttttcggatagaaaagttcctgttactggaggaacgacacaagcagcttatcgagtaccgcaaaatcaactctctgtaatgagtaatgagggatatgcaattaatagtggatatatttatctctattggagagattacaactgggtctatccatttgatcctaagacaaagaaagtttctgcaacgaaacaaatcaaaactcatggtgagccaacaacattatactttaatggaaatataagacctaaaggttatgacatttttactgttgggattggtgtaaacggagatcctggtgcaactcctcttgaagctgagaaatttatgcaatcaatatcaagtaaaacagaaaattatactaatgttgatgatacaaataaaatttatgatgagctaaataaatactttaaaacaattgttgaggaaaaacattctattgttgatggaaatgtgactgatcctatgggagagatgattgaattccaattaaaaaatggtcaaagttttacacatgatgattacgttttggttggaaatgatggcagtcaattaaaaaatggtgtggctcttggtggaccaaacagtgatgggggaattttaaaagatgttacagtgacttatgataagacatctcaaaccatcaaaatcaatcatttgaacttaggaagtggacaaaaagtagttcttacctatgatgtacgtttaaaagataactatataagtaacaaattttacaatacaaataatcgtacaacgctaagtccgaagagtgaaaaagaaccaaatactattcgtgatttcccaattcccaaaattcgtgatgttcgtgagtttccggtactaaccatcagtaatcagaagaaaatgggtgaggttgaatttattaaagttaataaagacaaacattcagaatcgcttttgggagctaagtttcaacttcagatagaaaaagatttttctgggtataagcaatttgttccagagggaagtgatgttacaacaaagaatgatggtaaaatttattttaaagcacttcaagatggtaactataaattatatgaaatttcaagtccagatggctatatagaggttaaaacgaaacctgttgtgacatttacaattcaaaatggagaagttacgaacctgaaagcagatccaaatgctaataaaaatcaaatcgggtatcttgaaggaaatggtaaacatcttattaccaacactcccaaacgcccaccaggtgtt

SEQ ID NO: 369 - DNA, 2490 bp, Streptococcus agalactiae
ggtgaaacccaagataccaatcaagcacttggaaaagtaattgttaaaaaaacgggggacaatgctacaccattaggcaaagcgacttttgtgttaaaaaatgacaatgataagtcagaaacaagtcacgaaacggtagagggttctggagaagcaacctttgaaaacataaaacctggagactacacattaagagaagaaacagcaccaattggttataaaaaaactgataaaacctggaaagttaaagttgcagataacggagcaacaataatcgagggtatggatgcagataaagcagagaaacgaaaagaagttttgaatgcccaatatccaaaatcagctatttatgaggatacaaaagaaaattacccattagttaatgtagagggttccaaagttggtgaacaatacaaagcattgaatccaataaatggaaaagatggtcgaagagagattgctgaaggttggttatcaaaaaaaattacaggggtcaatgatctcgataagaataaatataaaattgaattaactgttgagggtaaaaccactgttgaaacgaaagaacttaatcaaccactagatgtcgttgtgctattagataattcaaatagtatgaataatgaaagagccaataattctcaaagagcattaaaagctggggaagcagttgaaaagctgattgataaaattacatcaaataaagacaatagagtagctcttgtgacatatgcctcaaccatttttgatggtactgaagcgaccgtatcaaagggagttgccgatcaaaatggtaaagcgctgaatgatagtgtatcatgggattatcataaaactacttttacagcaactacacataattacagttatttaaatttaacaaatgatgctaacgaagttaatattctaaagtcaagaattccaaaggaagcggagcatataaatggggatcgcacgctctatcaatttggtgcgacatttactcaaaaagctctaatgaaagcaaatgaaattttagagacacaaagttctaatgctagaaaaaaacttatttttcacgtaactgatggtgtccctacgatgtcttatgccataaattttaatccttatatatcaacatcttaccaaaaccagtttaattcttttttaaataaaataccagatagaagtggtattctccaagaggattttataatcaatggtgatgattatcaaatagtaaaaggagatggagagagttttaaactgttttcggatagaaaagttcctgttactggaggaacgacacaagcagcttatcgagtaccgcaaaatcaactctctgtaatgagtaatgagggatatgcaattaatagtggatatatttatctctattggagagattacaactgggtctatccatttgatcctaagacaaagaaagtttctgcaacgaaacaaatcaaaactcatggtgagccaacaacattatactttaatggaaatataagacctaaaggttatgacatttttactgttgggattggtgtaaacggagatcctggtgcaactcctcttgaagctgagaaatttatgcaatcaatatcaagtaaaacagaaaattatactaatgttgatgatacaaataaaatttatgatgagctaaataaatactttaaaacaattgttgaggaaaaacattctattgttgatggaaatgtgactgatcctatgggagagatgattgaattccaattaaaaaatggtcaaagttttacacatgatgattacgttttggttggaaatgatggcagtcaattaaaaaatggtgtggctcttggtggaccaaacagtgatgggggaattttaaaagatgttacagtgacttatgataagacatctcaaaccatcaaaatcaatcatttgaacttaggaagtggacaaaaagtagttcttacctatgatgtacgtttaaaagataactatataagtaacaaattttacaatacaaataatcgtacaacgctaagtccgaagagtgaaaaagaaccaaatactattcgtgatttcccaattcccaaaattcgtgatgttcgtgagtttccggtactaaccatcagtaatcagaagaaaatgggtgaggttgaatttattaaagttaataaagacaaacattcagaatcgcttttgggagctaagtttcaacttcagatagaaaaagatttttctgggtataagcaatttgttccagagggaagtgatgttacaacaaagaatgatggtaaaatttattttaaagcacttcaagatggtaactataaattatatgaaatttcaagtccagatggctatatagaggttaaaacgaaacctgttgtgacatttacaattcaaaatggagaagttacgaacctgaaagcagatccaaatgctaataaaaatcaaatcgggtatcttgaaggaaatggtaaacatcttattaccaacactcccaaacgcccaccaggtgtt

SEQ ID NO: 370 - DNA, 2490 bp, Streptococcus agalactiae; identical to SEQ ID NO: 368

SEQ ID NO: 371 - DNA, 2490 bp, Streptococcus agalactiae
ggtgaaacccaagataccaatcaagcacttggaaaagtaattgttaaaaaaacgggagacaatgctacaccattaggcaaagcgacttttgtgttaaaaaatgacaatgataagtcagaaacaagtcacgaaacggtagagggttctggagaagcaacctttgaaaacataaaacctggagactacacattaagagaagaaacagcaccaattggttataaaaaaactgataaaacctggaaagttaaagttgcagataacggagcaacaataatcgagggtatggatgcagataaagcagagaaacgaaaagaagttttgaatgcccaatatccaaaatcagctatttatgaggatacaaaagaaaattacccattagttaatgtagagggttccaaagttggtgaacaatacaaagcattgaatccaataaatggaaaagatggtcgaagagagattgctgaaggttggttatcaaaaaaaaatacaggggtcaatgatctcgataagaataaatataaaattgaattaactgttgagggtaaaaccactgttgaaacgaaagaacttaatcaaccactagatgtcgttgtgctattagataattcaaatagtatgaataatgaaagagccaataattctcaaagagcattaaaagctggggaagcagttgaaaagctgattgataaaattacatcaaataaagacaatagagtagctcttgtgacatatgcctcaaccatttttgatggtactgaagcgaccgtatcaaagggagttgccgatcaaaatggtaaagcgctgaatgatagtgtatcatgggattatcataaaactacttttacagcaactacacataattacagttatttaaatttaacaaatgatgctaacgaagttaatattctaaagtcaagaattccaaaggaagcggagcatataaatggggatcgcacgctctatcaatttggtgcgacatttactcaaaaagctctaatgaaagcaaatgaaattttagagacacaaagttctaatgctagaaaaaaacttatttttcacgtaactgatggtgtccctacgatgtcttatgccataaattttaatccttatatatcaacatcttaccaaaaccagtttaattcttttttaaataaaataccagatagaagtggtattctccaagaggattttataatcaatggtgatgattatcaaatagtaaaaggagatggagagagttttaaactgttttcggatagaaaagttcctgttactggaggaacgacacaagcagcttatcgagtaccgcaaaatcaactctctgtaatgagtaatgagggatatgcaattaatagtggatatatttatctctattggagagattacaactgggtctatccatttgatcctaagacaaagaaagtttctgcaacgaaacaaatcaaaactcatggtgagccaacaacattatactttaatggaaatataagacctaaaggttatgacatttttactgttgggattggtgtaaacggagatcctggtgcaactcctcttgaagctgagaaatttatgcaatcaatatcaagtaaaacagaaaattatactaatgttgatgatacaaataaaatttatgatgagctaaataaatactttaaaacaattgttgaggaaaaacattctattgttgatggaaatgtgactgatcctatgggagagatgattgaattccaattaaaaaatggtcaaagttttacacatgatgattacgttttggttggaaatgatggcagtcaattaaaaaatggtgtggctcttggtggaccaaacagtgatgggggaattttaaaagatgttacagtgacttatgataagacatctcaaaccatcaaaatcaatcatttgaacttaggaagtggacaaaaagtagttcttacctatgatgtacgtttaaaagataactatataagtaacaaattttacaatacaaataatcgtacaacgctaagtccgaagagtgaaaaagaaccaaatactattcgtgatttcccaattcccaaaattcgtgatgttcgtgagtttccggtactaaccatcagtaatcagaagaaaatgggtgaggttgaatttattaaagttaataaagacaaacattcagaatcgcttttgggagctaagtttcaacttcagatagaaaaagatttttctgggtataagcaatttgttccagagggaagtgatgttacaacaaagaatgatggtaaaatttattttaaagcacttcaagatggtaactataaattatatgaaatttcaagtccagatggctatatagaggttaaaacgaaacctgttgtgacatttacaattcaaaatggagaagttacgaacctgaaagcagatccaaatgctaataaaaatcaaatcgggtatcttgaaggaaatggtaaacatcttattaccaacactcccaaacgcccaccaggtgtt

SEQ ID NO: 372 - DNA, 2490 bp, Streptococcus agalactiae
ggtgaaacccaagataccaatcaagcacttggaaaagtaattgttaaaaaaacgggagacaatgctacaccattaggcaaagcgacttttgtgttaaaaaatgacaatgataagtcagaaacaagtcacgaaacggtagagggttctggaraagcaacctttgaaaacataaaacctggagactacacattaagagaagaaacagcaccaattggttataaaaaaactgataaaacctggaaagttaaagttgcagataacggagcaacaataatcgagggtatggatgcagataaagcagagaaacgaaaagaagttttgaatgcccaatatccaaaatcagctatttatgaggatacaaaagaaaattacccattagttaatgtagagggttccaaagttggtgaacaatacaaagcattgaatccaataaatggaaaagatggtcgaagagagattgctgaaggttggttatcaaaaaaaaatacaggggtcaatgatctcgataagaataaatataaaattgaattaactgttgagggtaaaaccactgttgaaacgaaagaacttaatcaaccactagatgtcgttgtgctattagataattcaaatagtatgaataatgaaagagccaataattctcaaagagcattaaaagctggggaagcagttgaaaagctgattgataaaattacatcaaataaagacaatagagtagctcttgtgacatatgcctcaaccatttttgatggtactgaagcgaccgtatcaaagggagttgccgatcaaaatggtaaagcgctgaatgatagtgtatcatgggattatcataaaactacttttacagcaactacacataattacagttatttaaatttaacaaatgatgctaacgaagttaatattctaaagtcaagaattccaaaggaagcggagcatataaatggggatcgcacgctctatcaatttggtgcgacatttactcaaaaagctctaatgaaagcaaatgaaattttagagacacaaagttctaatgctagaaaaaaacttatttttcacgtaactgatggtgtccctacgatgtcttatgccataaattttaatccttatatatcaacatcttaccaaaaccagtttaattcttttttaaataaaataccagatagaagtggtattctccaagaggattttataatcaatggtgatgattatcaaatagtaaaaggagatggagagagttttaaactgttttcggatagaaaagttcctgttactggaggaacgacacaagcagcttatcgagtaccgcaaaatcaactctctgtaatgagtaatgagggatatgcaattaatagtggatatatttatctctattggagagattacaactgggtctatccatttgatcctaagacaaagaaagtttctgcaacgaaacaaatcaaaactcatggtgagccaacaacattatactttaatggaaatataagacctaaaggttatgacatttttactgttgggattggtgtaaacggagatcctggtgcaactcctcttgaagctgagaaatttatgcaatcaatatcaagtaaaacagaaaattatactaatgttgatgatacaaataaaatttatgatgagctaaataaatactttaaaacaattgttgaggaaaaacattctattgttgatggaaatgtgactgatcctatgggagagatgattgaattccaattaaaaaatggtcaaagttttacacatgatgattacgttttggttggaaatgatggcagtcaattaaaaaatggtgtggctcttggtggaccaaacagtgatgggggaattttaaaagatgttacagtgacttatgataagacatctcaaaccatcaaaatcaatcatttgaacttaggaagtggacaaaaagtagttcttacctatgatgtacgtttaaaagataactatataagtaacaaattttacaatacaaataatcgtacaacgctaagtccgaagagtgaaaaagaaccaaatactattcgtgatttcccaattcccaaaattcgtgatgttcgtgagtttccggtactaaccatcagtaatcagaagaaaatgggtgaggttgaatttattaaagttaataaagacaaacattcagaatcgcttttgggagctaagtttcaacttcagatagaaaaagatttttctgggtataagcaatttgttccagagggaagtgatgttacaacaaagaatgatggtaaaatttattttaaagcacttcaagatggtaactataaattatatgaaatttcaagtccagatggctatatagaggttaaaacgaaacctgttgtgacatttacaattcaaaatggagaagttacgaacctgaaagcagatccaaatgctaataaaaatcaaatcgggtatcttgaaggaaatggtaaacatcttattaccaacactcccaaacgcccaccaggtgtt

SEQ ID NO: 373 - DNA, 2462 bp, Streptococcus agalactiae
ttggaaaagtaattgttaaaaaaacgggagacactgctacaccattaggcaaagcgacttttgtgttaaaaaatgacaatgataagtcagaaacaagtcacgaaacggtagagggttctggaaaagcaacctttgaaaacataaaacctggagactacacattaagagaagaaacagcaccaattggttataaaaaaactgataaaacctggaaagttaaagttgcagataacggagcamcaataatcgagggtatggatgcagataaagcagagaaacgaaaagaagttttgaatgcccaatatccaaaatcagctatttatgaggatacaaaagaaaattacccattagttaatgtagagggttccaaagttggtgaacaatacaaagcattgaatccaataaatggaaaagatggtcgaagagagattgctgaaggttggttatcaaaaaaaattacaggggtcaatgatctcgataagaataaatataaaattgaattaactgttgagggtaaaaccactgttgaaacgaaagaacttaatcaaccactagatgtcgttgtgctattagataattcaaatagtatgaataatgaaagagccaataattctcaaagagcattaaaagctggggaagcagttgaaaagctgattgataaaattacatcaaataaagacaatagagtagctcttgtgacatatgcctcaaccatttttgatggtactgaagcgaccgtatcaaagggagttgccgatcaaaatggtaaagcgctgaatgatagtgtatcatgggattatcataaaactacttttacagcaactacacataattacagttatttaaatttaacaaatgatgctaacgaagttaatattctaaagtcaagaattccaaaggaagcggagcatataaatggggatcgcacgctctatcaatttggtgcgacatttactcaaaaagctctaatgaaagcaaatgaaattttagagacacaaagttctaatgctagaaaaaaacttatttttcacgtaactgatggtgtccctacgatgtcttatgccataaattttaatccttatatatcaacatcttaccaaaaccagtttaattcttttttaaataaaataccagatagaagtggtattctccaagaggattttataatcaatggtgatgattatcaaatagtaaaaggagatggagagagttttaaactgttttcggatagaaaagttcctgttactggaggaacgacacaagcagcttatcgagtaccgcaaaatcaactctctgtaatgagtaatgagggatatgcaattaatagtggatatatttatctctattggagagattacaactgggtctatccatttgatcctaagacaaagaaagtttctgcaacgaaacaaatcaaaactcatggtgagccaacaacattatactttaatggaaatataagacctaaaggttatgacatttttactgttgggattggtgtaaacggagatcctggtgcaactcctcttgaagctgagaaatttatgcaatcaatatcaagtaaaacagaaaattatactaatgttgatgatacaaataaaatttatgatgagctaaataaatactttaaaacaattgttgaggaaaaacattctattgttgatggaaatgtgactgatcctatgggagagatgattgaattccaattaaaaaatggtcaaagttttacacatgatgattacgttttggttggaaatgatggcagtcaattaaaaaatggtgtggctcttggtggaccaaacagtgatgggggaattttaaaagatgttacagtgacttatgataagacatctcaaaccatcaaaatcaatcatttgaacttaggaagtggacaaaaagtagttcttacctatgatgtacgtttaaaagataactatataagtaacaaattttacaatacaaataatcgtacaacgctaagtccgaagagtgaaaaagaaccaaatactattcgtgatttcccaattcccaaaattcgtgatgttcgtgagtttccggtactaaccatcagtaatcagaagaaaatgggtgaggttgaatttattaaagttaataaagacaaacattcagaatcgcttttgggagctaagtttcaacttcagatagaaaaagatttttctgggtataagcaatttgttccagagggaagtgatgttacaacaaagaatgatggtaaaatttattttaaagcacttcaagatggtaactataaattatatgaaatttcaagtccagatggctatatagaggttaaaacgaaacctgttgtgacatttacaattcaaaatggagaagttacgaacctgaaagcagatccaaatgctaataaaaatcaaatcgggtatcttgaaggaaatggtaaacatcttattaccaacactcccaaacgcccaccaggtgtt

SEQ ID NO: 374 - DNA, 2490 bp, Streptococcus agalactiae
ggtgaaacccaagataccaatcaagcacttggaaaagtaattgttaaaaaaacgggagacaatgctacaccattaggcaaagcgacttttgtgttaaaaaatgacaatgataagtcagaaacaagtcacgaaacggtagagggttctggaraagcaacctttgaaaacataaaacctggagactacacattaagagaagaaacagcaccaattggttataaaaaaactgataaaacctggaaagttaaagttgcagataacggagcaacaataatcgagggtatggatgcagataaagcagagaaacgaaaagaagttttgaatgcccaatatccaaaatcagctatttatgaggatacaaaagaaaattacccattagttaatgtagagggttccaaagttggtgaacaatacaaagcattgaatccaataaatggaaaagatggtcgaagagagattgctgaaggttggttatcaaaaaaaattacaggggtcaatgatctcgataagaataaatataaaattgaattaactgttgagggtaaaaccactgttgaaacgaaagaacttaatcaaccactagatgtcgttgtgctattagataattcaaatagtatgaataatgaaagagccaataattctcaaagagcattaaaagctggggaagcagttgaaaagctgattgataaaattacatcaaataaagacaatagagtagctcttgtgacatatgcctcaaccatttttgatggtactgaagcgaccgtatcaaagggagttgccgatcaaaatggtaaagcgctgaatgatagtgtatcatgggattatcataaaactacttttacagcaactacacataattacagttatttaaatttaacaaatgatgctaacgaagttaatattctaaagtcaagaattccaaaggaagcggagcatataaatggggatcgcacgctctatcaatttggtgcgacatttactcaaaaagctctaatgaaagcaaatgaaattttagagacacaaagttctaatgctagaaaaaaacttatttttcacgtaactgatggtgtccctacgatgtcttatgccataaattttaatccttatatatcaacatcttaccaaaaccagtttaattcttttttaaataaaataccagatagaagtggtattctccaagaggattttataatcaatggtgatgattatcaaatagtaaaaggagatggagagagttttaaactgttttcggatagaaaagttcctgttactggaggaacgacacaagcagcttatcgagtaccgcaaaatcaactctctgtaatgagtaatgagggatatgcaattaatagtggatatatttatctctattggagagattacaactgggtctatccatttgatcctaagacaaagaaagtttctgcaacgaaacaaatcaaaactcatggtgagccaacaacattatactttaatggaaatataagacctaaaggttatgacatttttactgttgggattggtgtaaacggagatcctggtgcaactcctcttgaagctgagaaatttatgcaatcaatatcaagtaaaacagaaaattatactaatgttgatgatacaaataaaatttatgatgagctaaataaatactttaaaacaattgttgaggaaaaacattctattgttgatggaaatgtgactgatcctatgggagagatgattgaattccaattaaaaaatggtcaaagttttacacatgatgattacgttttggttggaaatgatggcagtcaattaaaaaatggtgtggctcttggtggaccaaacagtgatgggggaattttaaaagatgttacagtgacttatgataagacatctcaaaccatcaaaatcaatcatttgaacttaggaagtggacaaaaagtagttcttacctatgatgtacgtttaaaagataactatataagtaacaaattttacaatacaaataatcgtacaacgctaagtccgaagagtgaaaaagaaccaaatactattcgtgatttcccaattcccaaaattcgtgatgttcgtgagtttccggtactaaccatcagtaatcagaagaaaatgggtgaggttgaatttattaaagttaataaagacaaacattcagaatcgcttttgggagctaagtttcaacttcagatagaaaaagatttttctgggtataagcaatttgttccagagggaagtgatgttacaacaaagaatgatggtaaaatttattttaaagcacttcaagatggtaactataaattatatgaaatttcaagtccagatggctatatagaggttaaaacgaaacctgttgtgacatttacaattcaaaatggagaagttacgaacctgaaagcagatccaaatgctaataaaaatcaaatcgggtatcttgaaggaaatggtaaacatcttattaccaacactcccaaacgcccaccaggtgtt

SEQ ID NO: 375 - DNA, 2439 bp, Streptococcus agalactiae
ggtgaaacccaagataccaatcaagcacttggaaaagtaattgttaaaaaaacgggagacaatgctacaccattaggcaaagcgacttttgtgttaaaaaatgacaatgataagtcagaaacaagtcacgaaacggtagagggttctggagaagcaacctttgaaaacataaaacctggagactacacattaagagaagaaacagcaccaattggttataaaaaaactgataaaacctggaaagttaaagttgcagataacggagcaacaataatcgagggtatggatgcagataaagcagagaaacgaaaagaagttttgaatgcccaatatccaaaatcagctatttatgaggatacaaaagaaaattacccattagttaatgtagagggttccaaagttggtgaacaatacaaagcattgaatccaataaatggaaaagatggtcgaagagagattgctgaaggttggttatcaaaaaaaattacaggggtcaatgatctcgataagaataaatataaaattgaattaactgttgagggtaaaaccactgttgaaacgaaagaacttaatcaaccactagatgtcgttgtgctattagataattcaaatagtatgaataatgaaagagccaataattctcaaagagcattaaaagctggggaagcagttgaaaagctgattgataaaattacatcaaataaagacaatagagtagctcttgtgacatatgcctcaaccatttttgatggtactgaagcgaccgtatcaaagggagttgccgatcaaaatggtaaagcgctgaatgatagtgtatcatgggattatcataaaactacttttacagcaactacacataattacagttatttaaatttaacaaatgatgctaacgaagttaatattctaaagtcaagaattccaaaggaagcggagcatataaatggggatcgcacgctctatcaatttggtgcgacatttactcaaaaagctctaatgaaagcaaatgaaattttagagacacaaagttctaatgctagaaaaaaacttatttttcacgtaactgatggtgtccctacgatgtcttatgccataaattttaatccttatatatcaacatcttaccaaaaccagtttaattcttttttaaataaaataccagatagaagtggtattctccaagaggattttataatcaatggtgatgattatcaaatagtaaaaggagatggagagagttttaaactgttttcggatagaaaagttcctgttactggaggaacgacacaagcagcttatcgagtaccgcaaaatcaactctctgtaatgagtaatgagggatatgcaattaatagtggatatatttatctctattggagagattacaactgggtctatccatttgatcctaagacaaagaaagtttctgcaacgaaacaaatcaaaactcatggtgagccaacaacattatactttaatggaaatataagacctaaaggttatgacatttttactgttgggattggtgtaaacggagatcctggtgcaactcctcttgaagctgagaaatttatgcaatcaatatcaagtaaaacagaaaattatactaatgttgatgatacaaataaaatttatgatgagctaaataaatactttaaaacaattgttgaggaaaaacattctattgttgatggaaatgtgactgatcctatgggagagatgattgaattccaattaaaaaatggtcaaagttttacacatgatgattacgttttggttggaaatgatggcagtcaattaaaaaatggtgtggctcttggtggaccaaacagtgatgggggaattttaaaagatgttacagtgacttatgataagacatctcaaaccatcaaaatcaatcatttgaacttaggaagtggacaaaaagtagttcttacctatgatgtacgtttaaaagataactatataagtaacaaattttacaatacaaataatcgtacaacgctaagtccgaagagtgaaaaagaaccaaatactattcgtgatttcccaattcccaaaattcgtgatgttcgtgagtttccggtactaaccatcagtaatcaaaagaaaatgggtgaggttgaatttattaaagttaataaagacaaacattcagaatcgcttttgggagctaagtttcaacttcagataaaaaaagatttttctgggtataagcaatttgttccagagggaagtgatgttacaacaaagaatgatggtaaaatttattttaaagcacttcaagatggtaactataaattatatgaaatttcaagtccagatggctatatagaggttaaaacgaaacctgttgtgacatttacaattcaaaatggagaagttacgaacctgaaagcagatccaaatgctaataaaaatcaaatcgggtatcttgaa

SEQ ID NO: 376 - protein, 890 aa, Streptococcus agalactiae
MKKRQKIWRGLSVTLLILSQIPFGILVQGETQDTNQALGKVIVKKTGDNATPLGKATFVLKNDNDKSETSHETVEGSGEATFENIKPGDYTLREETAPIGYKKTDKTWKVKVADNGATIIEGMDADKAEKRKEVLNAQYPKSAIYEDTKENYPLVNVEGSKVGEQYKALNPINGKDGRREIAEGWLSKKITGVNDLDKNKYKIELTVEGKTTVETKELNQPLDVVVLLDNSNSMNNERANNSQRALKAGEAVEKLIDKITSNKDNRVALVTYASTIFDGTEATVSKGVADQNGKALNDSVSWDYHKTTFTATTHNYSYLNLTNDANEVNILKSRIPKEAEHINGDRTLYQFGATFTQKALMKANEILETQSSNARKKLIFHVTDGVPTMSYAINFNPYISTSYQNQFNSFLNKIPDRSGILQEDFIINGDDYQIVKGDGESFKLFSDRKVPVTGGTTQAAYRVPQNQLSVMSNEGYAINSGYIYLYWRDYNWVYPFDPKTKKVSATKQIKTHGEPTTLYFNGNIRPKGYDIFTVGIGVNGDPGATPLEAEKFMQSISSKTENYTNVDDTNKIYDELNKYFKTIVEEKHSIVDGNVTDPMGEMIEFQLKNGQSFTHDDYVLVGNDGSQLKNGVALGGPNSDGGILKDVTVTYDKTSQTIKINHLNLGSGQKVVLTYDVRLKDNYISNKFYNTNNRTTLSPKSEKEPNTIRDFPIPKIRDVREFPVLTISNQKKMGEVEFIKVNKDKHSESLLGAKFQLQIEKDFSGYKQFVPEGSDVTTKNDGKIYFKALQDGNYKLYEISSPDGYIEVKTKPVVTFTIQNGEVTNLKADPNANKNQIGYLEGNGKHLITNTPKRPPGVFPKTGGIGTIVYILVGSTFMILTICSFRRKQL

SEQ ID NO: 377 - protein, 830 aa, Streptococcus agalactiae
GETQDTNQALGKVIVKKTGDNATPLGKATFVLKNDNDKSETSHETVEGSGEATFENIKPGDYTLREETAPIGYKKTDKTWKVKVADNGATIIEGMDADKAEKRKEVLNAQYPKSAIYEDTKENYPLVNVEGSKVGEQYKALNPINGKDGRREIAEGWLSKKITGVNDLDKNKYKIELTVEGKTTVETKELNQPLDVVVLLDNSNSMNNERANNSQRALKAGEAVEKLIDKITSNKDNRVALVTYASTIFDGTEATVSKGVADQNGKALNDSVSWDYHKTTFTATTHNYSYLNLTNDANEVNILKSRIPKEAEHINGDRTLYQFGATFTQKALMKANEILETQSSNARKKLIFHVTDGVPTMSYAINFNPYISTSYQNQFNSFLNKIPDRSGILQEDFIINGDDYQIVKGDGESFKLFSDRKVPVTGGTTQAAYRVPQNQLSVMSNEGYAINSGYIYLYWRDYNWVYPFDPKTKKVSATKQIKTHGEPTTLYFNGNIRPKGYDIFTVGIGVNGDPGATPLEAEKFMQSISSKTENYTNVDDTNKIYDELNKYFKTIVEEKHSIVDGNVTDPMGEMIEFQLKNGQSFTHDDYVLVGNDGSQLKNGVALGGPNSDGGILKDVTVTYDKTSQTIKINHLNLGSGQKVVLTYDVRLKDNYISNKFYNTNNRTTLSPKSEKEPNTIRDFPIPKIRDVREFPVLTISNQKKMGEVEFIKVNKDKHSESLLGAKFQLQIEKDFSGYKQFVPEGSDVTTKNDGKIYFKALQDGNYKLYEISSPDGYIEVKTKPVVTFTIQNGEVTNLKADPNANKNQIGYLEGNGKHLITNTPKRPPGV

SEQ ID NO: 378 - protein, 830 aa, Streptococcus agalactiae; identical to SEQ ID NO: 377

SEQ ID NO: 379 - protein, 830 aa, Streptococcus agalactiae; identical to SEQ ID NO: 377

SEQ ID NO: 380 - protein, 830 aa, Streptococcus agalactiae
GETQDTNQALGKVIVKKTGDNATPLGKATFVLKNDNDKSETSHETVEGSGEATFENIKPGDYTLREETAPIGYKKTDKTWKVKVADNGATIIEGMDADKAEKRKEVLNAQYPKSAIYEDTKENYPLVNVEGSKVGEQYKALNPINGKDGRREIAEGWLSKKNTGVNDLDKNKYKIELTVEGKTTVETKELNQPLDVVVLLDNSNSMNNERANNSQRALKAGEAVEKLIDKITSNKDNRVALVTYASTIFDGTEATVSKGVADQNGKALNDSVSWDYHKTTFTATTHNYSYLNLTNDANEVNILKSRIPKEAEHINGDRTLYQFGATFTQKALMKANEILETQSSNARKKLIFHVTDGVPTMSYAINFNPYISTSYQNQFNSFLNKIPDRSGILQEDFIINGDDYQIVKGDGESFKLFSDRKVPVTGGTTQAAYRVPQNQLSVMSNEGYAINSGYIYLYWRDYNWVYPFDPKTKKVSATKQIKTHGEPTTLYFNGNIRPKGYDIFTVGIGVNGDPGATPLEAEKFMQSISSKTENYTNVDDTNKIYDELNKYFKTIVEEKHSIVDGNVTDPMGEMIEFQLKNGQSFTHDDYVLVGNDGSQLKNGVALGGPNSDGGILKDVTVTYDKTSQTIKINHLNLGSGQKVVLTYDVRLKDNYISNKFYNTNNRTTLSPKSEKEPNTIRDFPIPKIRDVREFPVLTISNQKKMGEVEFIKVNKDKHSESLLGAKFQLQIEKDFSGYKQFVPEGSDVTTKNDGKIYFKALQDGNYKLYEISSPDGYIEVKTKPVVTFTIQNGEVTNLKADPNANKNQIGYLEGNGKHLITNTPKRPPGV

SEQ ID NO: 381 - protein, 830 aa, Streptococcus agalactiae
  VARIANT 51: Xaa = Any Amino Acid
GETQDTNQALGKVIVKKTGDNATPLGKATFVLKNDNDKSETSHETVEGSGXATFENIKPGDYTLREETAPIGYKKTDKTWKVKVADNGATIIEGMDADKAEKRKEVLNAQYPKSAIYEDTKENYPLVNVEGSKVGEQYKALNPINGKDGRREIAEGWLSKKNTGVNDLDKNKYKIELTVEGKTTVETKELNQPLDVVVLLDNSNSMNNERANNSQRALKAGEAVEKLIDKITSNKDNRVALVTYASTIFDGTEATVSKGVADQNGKALNDSVSWDYHKTTFTATTHNYSYLNLTNDANEVNILKSRIPKEAEHINGDRTLYQFGATFTQKALMKANEILETQSSNARKKLIFHVTDGVPTMSYAINFNPYISTSYQNQFNSFLNKIPDRSGILQEDFIINGDDYQIVKGDGESFKLFSDRKVPVTGGTTQAAYRVPQNQLSVMSNEGYAINSGYIYLYWRDYNWVYPFDPKTKKVSATKQIKTHGEPTTLYFNGNIRPKGYDIFTVGIGVNGDPGATPLEAEKFMQSISSKTENYTNVDDTNKIYDELNKYFKTIVEEKHSIVDGNVTDPMGEMIEFQLKNGQSFTHDDYVLVGNDGSQLKNGVALGGPNSDGGILKDVTVTYDKTSQTIKINHLNLGSGQKVVLTYDVRLKDNYISNKFYNTNNRTTLSPKSEKEPNTIRDFPIPKIRDVREFPVLTISNQKKMGEVEFIKVNKDKHSESLLGAKFQLQIEKDFSGYKQFVPEGSDVTTKNDGKIYFKALQDGNYKLYEISSPDGYIEVKTKPVVTFTIQNGEVTNLKADPNANKNQIGYLEGNGKHLITNTPKRPPGV

SEQ ID NO: 382 - protein, 820 aa, Streptococcus agalactiae
  VARIANT 80: Xaa = Any Amino Acid
GKVIVKKTGDTATPLGKATFVLKNDNDKSETSHETVEGSGKATFENIKPGDYTLREETAPIGYKKTDKTWKVKVADNGAXIIEGMDADKAEKRKEVLNAQYPKSAIYEDTKENYPLVNVEGSKVGEQYKALNPINGKDGRREIAEGWLSKKITGVNDLDKNKYKIELTVEGKTTVETKELNQPLDVVVLLDNSNSMNNERANNSQRALKAGEAVEKLIDKITSNKDNRVALVTYASTIFDGTEATVSKGVADQNGKALNDSVSWDYHKTTFTATTHNYSYLNLTNDANEVNILKSRIPKEAEHINGDRTLYQFGATFTQKALMKANEILETQSSNARKKLIFHVTDGVPTMSYAINFNPYISTSYQNQFNSFLNKIPDRSGILQEDFIINGDDYQIVKGDGESFKLFSDRKVPVTGGTTQAAYRVPQNQLSVMSNEGYAINSGYIYLYWRDYNWVYPFDPKTKKVSATKQIKTHGEPTTLYFNGNIRPKGYDIFTVGIGVNGDPGATPLEAEKFMQSISSKTENYTNVDDTNKIYDELNKYFKTIVEEKHSIVDGNVTDPMGEMIEFQLKNGQSFTHDDYVLVGNDGSQLKNGVALGGPNSDGGILKDVTVTYDKTSQTIKINHLNLGSGQKVVLTYDVRLKDNYISNKFYNTNNRTTLSPKSEKEPNTIRDFPIPKIRDVREFPVLTISNQKKMGEVEFIKVNKDKHSESLLGAKFQLQIEKDFSGYKQFVPEGSDVTTKNDGKIYFKALQDGNYKLYEISSPDGYIEVKTKPVVTFTIQNGEVTNLKADPNANKNQIGYLEGNGKHLITNTPKRPPGV

SEQ ID NO: 383 - protein, 830 aa, Streptococcus agalactiae
  VARIANT 51: Xaa = Any Amino Acid
GETQDTNQALGKVIVKKTGDNATPLGKATFVLKNDNDKSETSHETVEGSGXATFENIKPGDYTLREETAPIGYKKTDKTWKVKVADNGATIIEGMDADKAEKRKEVLNAQYPKSAIYEDTKENYPLVNVEGSKVGEQYKALNPINGKDGRREIAEGWLSKKITGVNDLDKNKYKIELTVEGKTTVETKELNQPLDVVVLLDNSNSMNNERANNSQRALKAGEAVEKLIDKITSNKDNRVALVTYASTIFDGTEATVSKGVADQNGKALNDSVSWDYHKTTFTATTHNYSYLNLTNDANEVNILKSRIPKEAEHINGDRTLYQFGATFTQKALMKANEILETQSSNARKKLIFHVTDGVPTMSYAINFNPYISTSYQNQFNSFLNKIPDRSGILQEDFIINGDDYQIVKGDGESFKLFSDRKVPVTGGTTQAAYRVPQNQLSVMSNEGYAINSGYIYLYWRDYNWVYPFDPKTKKVSATKQIKTHGEPTTLYFNGNIRPKGYDIFTVGIGVNGDPGATPLEAEKFMQSISSKTENYTNVDDTNKIYDELNKYFKTIVEEKHSIVDGNVTDPMGEMIEFQLKNGQSFTHDDYVLVGNDGSQLKNGVALGGPNSDGGILKDVTVTYDKTSQTIKINHLNLGSGQKVVLTYDVRLKDNYISNKFYNTNNRTTLSPKSEKEPNTIRDFPIPKIRDVREFPVLTISNQKKMGEVEFIKVNKDKHSESLLGAKFQLQIEKDFSGYKQFVPEGSDVTTKNDGKIYFKALQDGNYKLYEISSPDGYIEVKTKPVVTFTIQNGEVTNLKADPNANKNQIGYLEGNGKHLITNTPKRPPGV

SEQ ID NO: 384 - protein, 813 aa, Streptococcus agalactiae
GETQDTNQALGKVIVKKTGDNATPLGKATFVLKNDNDKSETSHETVEGSGEATFENIKPGDYTLREETAPIGYKKTDKTWKVKVADNGATIIEGMDADKAEKRKEVLNAQYPKSAIYEDTKENYPLVNVEGSKVGEQYKALNPINGKDGRREIAEGWLSKKITGVNDLDKNKYKIELTVEGKTTVETKELNQPLDVVVLLDNSNSMNNERANNSQRALKAGEAVEKLIDKITSNKDNRVALVTYASTIFDGTEATVSKGVADQNGKALNDSVSWDYHKTTFTATTHNYSYLNLTNDANEVNILKSRIPKEAEHINGDRTLYQFGATFTQKALMKANEILETQSSNARKKLIFHVTDGVPTMSYAINFNPYISTSYQNQFNSFLNKIPDRSGILQEDFIINGDDYQIVKGDGESFKLFSDRKVPVTGGTTQAAYRVPQNQLSVMSNEGYAINSGYIYLYWRDYNWVYPFDPKTKKVSATKQIKTHGEPTTLYFNGNIRPKGYDIFTVGIGVNGDPGATPLEAEKFMQSISSKTENYTNVDDTNKIYDELNKYFKTIVEEKHSIVDGNVTDPMGEMIEFQLKNGQSFTHDDYVLVGNDGSQLKNGVALGGPNSDGGILKDVTVTYDKTSQTIKINHLNLGSGQKVVLTYDVRLKDNYISNKFYNTNNRTTLSPKSEKEPNTIRDFPIPKIRDVREFPVLTISNQKKMGEVEFIKVNKDKHSESLLGAKFQLQIKKDFSGYKQFVPEGSDVTTKNDGKIYFKALQDGNYKLYEISSPDGYIEVKTKPVVTFTIQNGEVTNLKADPNANKNQIGYLE

SEQ ID NO: 385 - DNA, 690 bp, Streptococcus agalactiae
atggtaaaattagtattcgcacgccacggtgaatctgagtggaataaagctaaccttttcactggatgggctgacgtagatctttcagaaaaaggtacacaacaagctattgatgctgggaaattaattcaagcagcaggtattgagttcgaccttgcttttacatcagttcttaaacgtgccatcaaaacaactaaccttgcccttgaagcagctgatcaactttgggtaccagttgaaaaatcatggcgcttgaacgaacgtcattacggtggattgacaggaaaaaataaagcagaagcagctgaacaatttggtgatgagcaagttcatatttggcgtcgttcatatgatgtattgcctccagatatggctaaagatgatgaacattcagcacatactgatcgtcgctatgcttcactagatgattctgttattccagatgcagaaaacctaaaagttactttagagcgtgctcttcctttctgggaagataaaattgctcctgctcttaaagatggtaaaaatgtgtttgttggtgcacacggtaactcaatccgtgctcttgtaaaacatatcaaacaattgtcagatgatgaaatcatggacgttgaaattcctaacttcccaccacttgttttcgaatttgatgaaaaattaaaccttgtttcagaatattacttaggtaaa

SEQ ID NO: 386 - DNA, 687 bp, Streptococcus agalactiae
gtaaaattagtattcgcacgccacggtgaatctgagtggaataaagctaaccttttcactggatgggctgacgtagatctttcagaaaaaggtacacaacaagctattgatgctgggaaattaattcaagcagcaggtattgagttcgaccttgcttttacatcagttcttaaacgtgccatcaaaacaactaaccttgcccttgaagcagctgatcaactttgggtaccagttgaaaaatcatggcgcttgaacgaacgtcattacggtggattgacaggaaaaaataaagcagaagcagctgaacaatttggtgatgagcaagttcatatttggcgtcgttcatatgatgtattgcctccagatatggctaaagatgatgaacattcagcacatactgatcgtcgctatgcttcactagatgattctgttattccagatgcagaaaacctaaaagttactttagagcgtgctcttcctttctgggaagataaaattgctcctgctcttaaagatggtaaaaatgtgtttgttggtgcacacggtaactcaatccgtgctcttgtaaaacatatcaaacaattgtcagatgatgaaatcatggacgttgaaattcctaacttcccaccacttgttttcgaatttgatgaaaaattaaaccttgtttcagaatattacttaggtaaa

SEQ ID NO: 387 - DNA, 687 bp, Streptococcus agalactiae
gtaaaattagtattcgcacgccacggtgaatctgagtggaataaagctaaccttttcactggatgggctgacgtagatctttcagaaaaaggtacacaacaagctattgatgctgggaaattaattcaagcagcaggtattgagttcgaccttgcttttacatcagttcttaaacgtgccatcaaaacaactaaccttgcccttgaagcagctgatcaactttgggtaccagttgaaaaatcatggcgcttaaacgaacgtcattacggtggattgacaggaaaaaataaagcagaagcagctgaacaatttggtgatgagcaagttcatatttggcgtcgttcatatgatgtattgcctccagatatggctaaagatgatgaacattcagcacatactgatcgtcgctatgcttcactagatgattctgttattccagatgcagaaaacctaaaagttactttagagcgtgctcttcctttctgggaagataaaattgctcctgctcttaaagatggtaaaaatgtgtttgttggtgcacacggtaactcaatccgtgctcttgtaaaacatatcaaacaattgtcagatgatgaaatcatggacgttgaaattcctaacttcccaccacttgttttcgaatttgatgaaaaattaaaccttgtttcagaatattacttaggtaaa

SEQ ID NO: 388 - DNA, 687 bp, Streptococcus agalactiae; identical to SEQ ID NO: 386

SEQ ID NO: 389 - DNA, 687 bp, Streptococcus agalactiae; identical to SEQ ID NO: 386

SEQ ID NO: 390 - DNA, 687 bp, Streptococcus agalactiae; identical to SEQ ID NO: 386

SEQ ID NO: 391 - DNA, 687 bp, Streptococcus agalactiae; identical to SEQ ID NO: 386

SEQ ID NO: 392 - DNA, 687 bp, Streptococcus agalactiae; identical to SEQ ID NO: 386

SEQ ID NO: 393 - DNA, 679 bp, Streptococcus agalactiae
agtattcgcacgccacggtgaatctgagtggaataaagctaaccttttcactggatgggctgacgtagatctttcagaaaaaggtacacaacaagctattgatgctgggaaattaattcaagcagcaggtattgagttcgaccttgcttttacatcagttcttaaacgtgccatcaaaacaactaaccttgcccttgaagcagctgatcaactttgggtaccagttgaaaaatcatggcgcttgaacgaacgtcattacggtggattgacaggaaaaaataaagcagaagcagctgaacaatttggtgatgagcaagttcatatttggcgtcgttcatatgatgtattgcctccagatatggctaaagatgatgaacattcagcacatactgatcgtcgctatgcttcactagatgattctgttattccagatgcagaaaacctaaaagttactttagagcgtgctcttcctttctgggaagataaaattgctcctgctcttaaagatggtaaaaatgtgtttgttggtgcacacggtaactcaatccgtgctcttgtaaaacatatcaaacaattgtcagatgatgaaatcatggacgttgaaattcctaacttcccaccacttgttttcgaatttgatgaaaaattaaaccttgtttcagaatattacttaggtaaa

SEQ ID NO: 394 - DNA, 687 bp, Streptococcus agalactiae; identical to SEQ ID NO: 386

SEQ ID NO: 395 - DNA, 687 bp, Streptococcus agalactiae; identical to SEQ ID NO: 386

SEQ ID NO: 396 - protein, 229 aa, Streptococcus agalactiae
VKLVFARHGESEWNKANLFTGWADVDLSEKGTQQAIDAGKLIQAAGIEFDLAFTSVLKRAIKTTNLALEAADQLWVPVEKSWRLNERHYGGLTGKNKAEAAEQFGDEQVHIWRRSYDVLPPDMAKDDEHSAHTDRRYASLDDSVIPDAENLKVTLERALPFWEDKIAPALKDGKNVFVGAHGNSIRALVKHIKQLSDDEIMDVEIPNFPPLVFEFDEKLNLVSEYYLGK

SEQ ID NO: 397 - protein, 229 aa, Streptococcus agalactiae; identical to SEQ ID NO: 396

SEQ ID NO: 398 - protein, 229 aa, Streptococcus agalactiae; identical to SEQ ID NO: 396

SEQ ID NO: 399 - protein, 229 aa, Streptococcus agalactiae; identical to SEQ ID NO: 396

SEQ ID NO: 400 - protein, 229 aa, Streptococcus agalactiae; identical to SEQ ID NO: 396

SEQ ID NO: 401 - protein, 229 aa, Streptococcus agalactiae; identical to SEQ ID NO: 396

SEQ ID NO: 402 - protein, 229 aa, Streptococcus agalactiae; identical to SEQ ID NO: 396

SEQ ID NO: 403 - protein, 229 aa, Streptococcus agalactiae; identical to SEQ ID NO: 396

SEQ ID NO: 404 - protein, 226 aa, Streptococcus agalactiae
VFARHGESEWNKANLFTGWADVDLSEKGTQQAIDAGKLIQAAGIEFDLAFTSVLKRAIKTTNLALEAADQLWVPVEKSWRLNERHYGGLTGKNKAEAAEQFGDEQVHIWRRSYDVLPPDMAKDDEHSAHTDRRYASLDDSVIPDAENLKVTLERALPFWEDKIAPALKDGKNVFVGAHGNSIRALVKHIKQLSDDEIMDVEIPNFPPLVFEFDEKLNLVSEYYLGK

SEQ ID NO: 405 - protein, 229 aa, Streptococcus agalactiae; identical to SEQ ID NO: 396

SEQ ID NO: 406 - protein, 229 aa, Streptococcus agalactiae; identical to SEQ ID NO: 396

SEQ ID NO: 407 - DNA, 636 bp, Streptococcus agalactiae
atgaatcttttaattatgggtttgcctggtgctggtaaaggtactcaagcagctaagatcgttgaagaatttggtgttgctcacatctcaacaggggatatgttccgcgccgcaatggctaatcaaaccgaaatgggacgtttagctaaaagttatattgataaaggtgaattggttcctgatgaagtaacaaacgggattgtaaaagagcgcttagctgaggatgatatcgcagaaaaaggttttttacttgatggatatccacgtactattgaacaagcacacgccttagatgctacgcttgaagaactaggactacgcttagatggtgttattaatattaaagtggatccatcatgtcttatagagcgtttgagtgktcgtattatcaatcgtaaaactggtgaaactttccacaaagtgttcaacccaccagtagattataaagaagaagattactatcaacgtgaagatgataagcctgaaactgtcaaacgtcgcttggacgttaatattgctcaaggagaacctattcttgaacactatcgtaagcttggtcttgttacagatattgaaggtaatcaagaaataacagaagtttttgcagatgttgaaaaagcgttgctagaactcaaa

SEQ ID NO: 408 - DNA, 621 bp, Streptococcus agalactiae; identical to SEQ ID NO: 111

SEQ ID NO: 409 - DNA, 560 bp, Streptococcus agalactiae; identical to SEQ ID NO: 113

SEQ ID NO: 410 - DNA, 621 bp, Streptococcus agalactiae
aatcttttaaccacgggttcgcctggtgctggtaaaggtactcaagcagctaagatcgttgaagaatttggtgttgctcacatctcaacaggggatatgttccgcgccgcaatggctaatcaaaccgaaatgggacgtttagctaaaagttatattgataaaggtgaattggttcctgatgaagtaacaaacgggattgtaaaagagcgcttagctgaggatgatatcgcagaaaaaggttttttacttgatggatatccacgtactattgaacaagcacacgccttagatgctacgcttgaagaactaggactacgcttagatggtgttattaatattaaagtggatccatcatgtcttatagagcgtttgagtggtcgtattatcaatcgtaaaactggtgaaactttccacaaagtgttcaacccaccagtagattataaagaagaagattactatcaacgtgaagatgataagcctgaaactgtcaaacgtcgcttggacgttaatattgctcaaggagaacctattcttgaacactatcgtaagcttggtcttgttacagatattgaaggtaatcaagaaataacagaagtttttgcagatgttgaaaaagcgttg

SEQ ID NO: 411 - DNA, 578 bp, Streptococcus agalactiae; identical to SEQ ID NO: 116

SEQ ID NO: 412 - DNA, 545 bp, Streptococcus agalactiae; identical to SEQ ID NO: 117

SEQ ID NO: 413 - DNA, 620 bp, Streptococcus agalactiae
atcttttaattatgggtttgcctggtgctggtaaaggtactcaagcagctaagattgttgaagaatttggtgttgctcacatctcaacaggggatatgttccgcgccgcaatggctaatcaaacccaaatgggacgtttagctaaaagttatattgataaaggtgaattggttcctgatgaagtaacaaacgggattgtaaaagagcgcttagctgaggatgatatcgcagaaaaaggttttttacttgatggatatccacgtactattgagcaagcacacgccttagatgctacgcttgaagaactaggactacgcttagatggtgttattaatattaaagtggatccaacatgccttatagagcgtttgagtggccgtattatcaatcgtaaaactggtgaaactttccacaaagtgttcaacccaccagtagattataaagaagaagattactatcaacgtgaagatgataagcctgaaactgtcaaacgtcgcttggacgttaatattgctcaaggagaacctattcttgaacactatcgtaagcttggtcttgttacagatattgaaggtaatcaagaaataacagaagtttttgcagatgttgaaaaagcgttg

SEQ ID NO: 414 - DNA, 533 bp, Streptococcus agalactiae
caggggatatgttccgcgccgcaatggctaatcaaaccgaaatgggacgtttagctaaaagttatattgataaaggtgaattggttcctgatgaagtaacaaacgggattgtaaaagagcgcttagctgaggatgatatcgcagaaaaaggttttttacttgatggatatccacgtactattgaacaagcacacgccttagatgctacgcttgaagaactaggactacgcttagatggtgttattaatattaaagtggatccatcatgtcttatagagcgtttgagtggtcgtattatcaatcgtaaaactggtgaaactttccacaaagtgttcaacccaccagtagattataaagaagaagattactatcaacgtgaagatgataagcctgaaactgtcaaacgtcgcttggacgttaatattgctcaaggagaatctattcttgaacactatcgtaagcttggtcttgttacagatattgaaggtaatcaagaaataacagaagtttttgcagatgttgaaaaagcgttg

SEQ ID NO: 415 - DNA, 581 bp, Streptococcus agalactiae; identical to SEQ ID NO: 120

SEQ ID NO: 416 - DNA, 618 bp, Streptococcus agalactiae
cttttaattatgggtttgcctggtgctggtaaaggtactcaagcagctaagattgttgaagaatttggtgttgctcacatctcaacaggggatatgttccgcgccgcaatggctaatcaaacccaaatgggacgtttagctaaaagttatattgataaaggtgaattggttcctgatgaagtaacaaacgggattgtaaaagagcgcttagctgaggatgatatcgcagaaaaaggttttttacttgatggatatccacgtactattgagcaagcacacgccttagatgctacgcttgaagaactaggactacgcttagatggtgttattaatattaaagtggatccaacatgccttatagagcgtttgagtggccgtattatcaatcgtaaaactggtgaaactttccacaaagtgttcaacccaccagtagattataaagaagaagattactatcaacgtgaagatgataagcctgaaactgtcaaacgtcgcttggacgttaatattgctcaaggagaacctattcttgaacactatcgtaagcttggtcttgttacagatattgaaggtaatcaagaaataacagaagtttttgcagatgttgaaaaagcgttg

SEQ ID NO: 417 - DNA, 519 bp, Streptococcus agalactiae; identical to SEQ ID NO: 122

SEQ ID NO: 418 - protein, 212 aa, Streptococcus agalactiae
  VARIANT 127: Xaa = Any Amino Acid
MNLLIMGLPGAGKGTQAAKIVEEFGVAHISTGDMFRAAMANQTEMGRLAKSYIDKGELVPDEVTNGIVKERLAEDDIAEKGFLLDGYPRTIEQAHALDATLEELGLRLDGVINIKVDPSCLIERLSXRIINRKTGETFHKVFNPPVDYKEEDYYQREDDKPETVKRRLDVNIAQGEPILEHYRKLGLVTDIEGNQEITEVFADVEKALLELK

SEQ ID NO: 419 - protein, 211 aa, Streptococcus agalactiae; identical to SEQ ID NO: 123

SEQ ID NO: 420 - protein, 186 aa, Streptococcus agalactiae; identical to SEQ ID NO: 124

SEQ ID NO: 421 - protein, 209 aa, Streptococcus agalactiae; identical to SEQ ID NO: 125

SEQ ID NO: 422 - protein, 192 aa, Streptococcus agalactiae; identical to SEQ ID NO: 127

SEQ ID NO: 423 - protein, 192 aa, Streptococcus agalactiae; identical to SEQ ID NO: 127

SEQ ID NO: 424 - protein, 181 aa, Streptococcus agalactiae; identical to SEQ ID NO: 129

SEQ ID NO: 425 - protein, 207 aa, Streptococcus agalactiae; identical to SEQ ID NO: 130

SEQ ID NO: 426 - protein, 177 aa, Streptococcus agalactiae; identical to SEQ ID NO: 131

SEQ ID NO: 427 - protein, 193 aa, Streptococcus agalactiae; identical to SEQ ID NO: 132

SEQ ID NO: 428 - protein, 210 aa, Streptococcus agalactiae; identical to SEQ ID NO: 133

SEQ ID NO: 429 - protein, 173 aa, Streptococcus agalactiae; identical to SEQ ID NO: 134

SEQ ID NO: 430 - DNA, 3699 bp, Streptococcus agalactiae
gtggataaacatcactcaaaaaaggctattttaaagttaacacttataacaactagtattttattaatgcatagcaatcaagtgaatgcagaggagcaagaattaaaaaaccaagagcaatcacctgtaattgctaatgttgctcaacagccatcgccatcggtaactactaatactgttgaaaaaacatctgtaacagctgcttctgctagtaatacagcgaaagaaatgggtgatacatctgtaaaaaatgacaaaacagaagatgaattattagaagagttatctaaaaaccttgatacgtctaatttgggggctgatcttgaagaagaatatccctctaaaccagagacaaccaacaataaagaaagcaatgtagtaacaaatgcttcaactgcaatagcacagaaagttccctcagcatatgaagaggtgaagccagaaagcaagtcatcgcttgctgttcttgatacatctaaaataacaaaattacaagccataacccaaagaggaaagggaaatgtagtagctattattgatactggctttgatattaaccatgatatttttcgtttagatagcccaaaagatgataagcacagctttaaaactaagacagaatttgaggaattaaaagcaaaacataatatcacttatgggaaatgggttaacgataagattgtttttgcacataactacgccaacaatacagaaacggtggctgatattgcagcagctatgaaagatggttatggttcagaagcaaagaatatttcgcatggtacacacgttgctggtatttttgtaggtaatagtaaacgtccagcaatcaatggtcttcttttagaaggtgcagcgccaaatgctcaagtcttattaatgcgtattccagataaaattgattcggacaaatttggtgaagcatatgctaaagcaatcacagacgctgttaatctaggagcaaaaacgattaatatgagtattggaaaaacagctgattctttaattgctctcaatgataaagttaaattagcacttaaattagcttctgagaagggcgttgcagttgttgtggctgccggaaatgaaggcgcatttggtatggattatagcaaaccattatcaactaatcctgactacggtacggttaatagtccagctatttctgaagatactttgagtgttgctagctatgaatcacttaaaactatcagtgaggtcgttgaaacaactattgaaggtaagttagttaagttgccgattgtgacttctaaaccttttgacaaaggtaaggcctacgatgtggtttatgccaattatggtgcaaaaaaagactttgaaggtaaggactttaaaggtaagattgcattaattgagcgtggtggtggacttgattttatgactaaaatcactcatgctacaaatgcaggtgttgttggtatcgttatttttaacgatcaagaaaaacgtggaaattttctaattccttaccgtgaattacctgtggggattattagtaaagtagatggcgagcgtataaaaaatacttcaagtcagttaacatttaaccagagttttgaagtagttgatagccaaggtggtaatcgtatgctggaacaatcaagttggggcgtgacagctgaaggagcaatcaagcctgatgtaacagcttctggctttgaaatttattcttcaacctataataatcaataccaaacaatgtctggtacaagtatggcttcaccacatgttgcaggattaatgacaatgcttcaaagtcatttggctgagaaatataaagggatgaatttagattctaaaaaattgctagaattgtctaaaaacatcctcatgagctcagcaacagcattatatagtgaagaggataaggcgttttattcaccacgtcagcaaggtgcaggtgtagttgatgctgaaaaagctatccaagctcaatattatattactggaaacgatggcaaagctaaaattaatctcaaacgaatgggagataaatttgatatcacagttacaattcataaacttgtagaaggtgtcaaagaattgtattatcaagctaatgtagcaacagaacaagtaaataaaggtaaatttgcccttaaaccacaagccttgctagatactaattggcagaaagtaattcttcgtgataaagaaacacaagttcgatttactattgatgctagtcaatttagtcagaaattaaaagaacagatggcaaatggttatttcttagaaggttttgtacgttttaaagaagccaaggatagtaatcaggagttaatgagtattccttttgtaggatttaatggtgattttgcgaacttacaagcacttgaaacaccgatttataagacgctttctaaaggtagtttctactataaaccaaatgatacaactcataaagaccaattggagtacaatgaatcagctccttttgaaagcaacaactatactgccttgttaacacaatcagcgtcttggggctatgttgattatgtcaaaaatggtggggagttagaattagcaccggagagtccaaaaagaattattttaggaacttttgagaataaggttgaggataaaacaattcatcttttggaaagagatgcagcgaataatccatattttgccatttctccaaataaagatggaaatagggacgaaatcactccccaggcaactttcttaagaaatgttaaggatatttctgctcaagttctagatcaaaatggaaatgttatttggcaaagtaaggttttaccatcttatcgtaaaaatttccataataatccaaagcaaagtgatggtcattatcgtatggatgctcttcagtggagtggtttagataaggatggcaaagttgtagcagatggtttttatacttatcgcttacgttacacaccagtagcagaaggagcaaatagtcaggagtcagactttaaagtacaagtaagtactaagtcaccaaatcttccttcacgagctcagtttgatgaaactaatcgaacattaagcttagccatgcctaaggaaagtagttatgttcctacatatcgtttacaattagttttatctcatgttgtaaaagatgaagaatatggggatgagacttcttaccattatttccatatagatcaagaaggtaaagtgacacttcctaaaacggttaagataggagagagtgaggttgcggtagaccctaaggccttgacacttgttgtggaagataaagctggtaatttcgcaacggtaaaattgtctgatctcttgaataaggcagtagtatcagagaaagaaaacgctatagtaatttctaacagtttcaaatattttgataacttgaaaaaagaacctatgtttatttctaaaaaagaaaaagtagtaaacaagaatctagaagaaataatattagttaagccgcaaactacagttactactcaatcattgtctaaagaaataactaaatcaggaaatgagaaagtcctcacttctacaaacaataatagtagcagagtagctaagatcatatcacctaaacataacggggattctgttaaccataccttacctagtacatcagatagagcaacgaatggtctatttgttggtactttggcattgttatctagtttacttctttatttgaaacccaaaaagactaaaaataatagtaaa

SEQ ID NO: 431 - DNA, 3498 bp, Streptococcus agalactiae
gaggagcaagaattaaaaaaccaagagcaatcacctgtaattgctaatgttgctcaacagccatcgccatcggtaactactaatattgttgaaaaaacatctgtaacagctgcttctgctagtaatacagtgaaagaaatgggtgatacatctgtaaaaaatgacaaaacagaagatgaattattagaagagttatctaaaaaccttgatacgtctaatttgggggctgatcttgaagaagaatatccctctaaaccagagacaaccaacaataaagaaagcaatgtagtaacaaatgcttcaactgcaatagcacagaaagttccctcagcgtatgaagaggtgaagccagaaagcaagtcatcgcttgctgtttttgatacatctaaaataacaaaattgcaagccataacccaaagaggaaagggaaatgtagtagctattattgatactggctttgatattaaccatgatatttttcgtttagatagcccaaaagatgataagcacagctttaaaactaaagcagaattcgaggaattaaaagcaaaacataatatcacttatgggaaatgggttaacgataagattgtttttgcacataactacgccaacaatacagaaacggtggctgatattgcagcagctatgaaagatggttatgggtcagaagcaaagaatatttcgcatggtacacacgttgctggtatttttgtaggtaatagtaaacgtccagcaatcaatggtcttcttttagaaggtgcagcgccaaatgctcaagtcttattaatgcgtattccagataaaattgattcggacaaatttggagaagcatatgctaaagcaatcacagacgctgttaatctaggagcaaaaacgattaatatgagccttggaaaaacagcagattctttaattgcactcaatgataaagttaaattagcacttaaattagcttctgagaagggcgttgcagttgttgtggctgccggaaatgaaggtgcatttggtatggattatagcaaaccattatcaactaatcctgactacggtacggttaatagtccagctatttctgaagatactttgagtgttgctagctatgaatcacttaaaactatcagtgaggtcgttgaaacaactattgaaggtaagttagttaagttgccgattgtgacttctaaaccttttgacaaaggtaaggcctacgatgtggtttatgccaattatggtgcaaaaaaagactttgaaggtaaggactttaaaggtaagattgcattaattgagcgtggtggtggacttgattttatgactaaaatcactcatgctacaaatgcaggtgttgttggtatcgttatttttaacgatcaagaaaaacgtggaaattttctaattccttaccgtgaattacctgtgggggttattagtaaagtagatggcgagcgtataaaaaatacttcaagtcagttaacatttaaccagagttttgaagtagttgatagccaaggtggcaatcgtatgctggaacaatcaagttggggcgtgacagctgaaggagcaatcaagcctgatgtaacagcttctggctttgaaatttattcttcaacctataataatcaataccaaacaatgtctggtacaagtatggcttcaccacatgttgcaggattaatgacaatgcttcaaagtcatttggctgagaaatataaagggatgaatttagattctaaaaaattgctagaattgtctaaaaacatcctcatgagctcagcaacagcattatatagtgaagaggataaggcgttttattcaccacgtcagcaaggtgcaggtgtagttgatgctgaaaaagctatccaagctcaatattatgttactggaaacgatggcaaagctaaaattaatctcaaacgagtgggagataaatttgatatcacagttacaattcataaacttgtagaaggtgtcaaagaattgtattatcaagctaatgtagcaacagaacaagtaaataaaggtaaatttgcccttaaaccacaagccttgctagatactaattggcagaaagtaattcttcgtgataaagaaacacaagttcgatttactattgatgctagtcaatttagtcagaaattaaaagaacagatggcaaatggttatttcttagaaggttttgtacgttttaaagaagccaaggatagtaatcaggagttaatgagtattccttttgtaggatttaatggtgattttgcgaacttacaagcacttgaaacaccgatttataagacgctttctaaaggtagtttctactataaaccaaatgatacaactcataaagaccaattggagtacaatgaatcagctccttttgaaagcaacaactatactgccttgttaacacaatcagcgtcttggggctatgttgattatgtcaaaaatggtggggagttagaattagcaccggagagtccaaaaagaattattttaggaacttttgagaataaggttgaggataaaacaattcatcttttggaaagagatgcagcgaataatccatattttgccatttctccaaataaagatggaaatagggatgaaatcactccccaggcaactttcttaagaaatgttaaggatatttctgctcaagttctagatcaaaatggaaatgttatttggcaaagtaaggttttaccatcttatcgtaaaaatttccataataatccaaagcaaagtgatggtcattatcgtatggatgcctttcagtggagtggtttagataaggatggcaaagttgtagcagatggtttttatacttatcgcctacgttacacaccagtagcagaaggagcaaatagtcaggagtcagactttaaagttcaagtaagtactaagtcaccaaatcttcctttactagctcagtttgatgaaactaatcgaacattaagcttagccatgcctaaggaaagtagttatgttcctacatatcgtttacaattagttttatctcatgttgtaaaagatgaagaatatggggatgagacttcttaccattatttccatatagatcaagaaggtaaagtgacacttcctaaaacggttaagataggagagagtgaggttgcagtagaccctaaggccttgacacttgttgtggaagataaagctggtaattttgcaacggtaaaattgtctgacctcttgaataaggcagtagtatcagagaaagaaaacgctatagtaatttctaacagtttcaaatattttgataacttgaaaaaagaatctatgtttatttctaaagaaggaaaagtagtaaacaagaatctagaagaaataacattagttaagccgcaaactacagttactactcaatcattgtctaaagaaataactaaatcaggaaatgagaaagtcctcacttctacaaacaataatagtagcagagtagctaagatcatatcacctaaacataacggggattctgttaaccatacc

SEQ ID NO: 432 - DNA, 3499 bp, Streptococcus agalactiae
gaggagcaagaattaaaaaaccaagagcaatcacctgtaattgctaatgttgctcaacagccatcgccatcggtaactactaatactgttgaaaaaacatctgtaacatctgcttctgctagtaatacagcgaaagaaatgggtgatacatctgtaaaaaatgacaaaacagaagatgaattattagaagagttatctaaaaaccttgatacgtctaatttgggggctgatcttgaagaagaatatccctctaaaccagagacaaccaacaataaagaaagcaatgtagtaacaaatgcttcaactgcaatagcacagaaagttccctcagcatatgaagaggtgaagccagaaagcaagtcatcacttgctgttcttgatacatctaaaataacaaaattgcaagccataacccaaagaggaaagggaaatgtagtagctattattgatactggctttgatattaaccatgatatttttcgtttagatagcccaaaagatgataagcacagctttaaaactaaggcagaatttgaggaattaaaagcaaaacataatatcacttatgggaaatgggttaacgataagattgtttttgcacataactacgccaacaatacagaaacggtggctgatattgcagcagctatgaaagatggttatgggtcagaagcaaagaatatttcgcatggtacacacgttgctggtatttttgtaggtaatagtaaacgtccagcaatcaatggtcttcttttagaaggtgcagcgccaaatgctcaagtcttattaatgcgtattccagataaaattgattcggacaaatttggtgaagcatatgctaaagcaatcacagacgctgttaatctaggagcaaaaacgattaatatgagccttggaaaaacagcagattctttaattgctctcaatgataaagttaaattagcacttaaattagcttctgagaagggcgttgcagttgttgtggctgccggaaatgaaggtgcatttggtatggattatagcaaaccattatcaactaatcctgactacggtacggttaatagtccagctatttctgaagatactttgagtgttgctagctatgaatcacttaaaactatcagtgaggtcgttgaaacaactattgaaggtaagttagttaagttgccgattgtgacttctaaaccttttgacaaaggtaaggcctacgatgtggtttatgccaattatggtgcaaaaaaaagactttgaaggtaaggactttaaaggtaagattgcattaattgagcgtggtggtggacttgattttatgactaaaatcactcatgctacaaatgcaggtgttgttggtatcgttatttttaacgatcaagaaaaacgtggaaattttctaattccttaccgtgaattacctgtgggggttattagtaaagtagatggcgagcgtataaaaaatacttcaagtcagttaacatttaaccagagttttgaagtagttgatagccaaggtggcaatcgtatgctggaacaatcaagttggggcgtgacagctgaaggagcaatcaagcctgatgtaacagcttctggctttgaaatttattcttcaacctataataatcaataccaaacaatgtctggtacaagtatggcttcaccacatgttgcaggattaatgacaatgcttcaaagtcatttggctgagaaatataaagggatgaatttagattctaaaaaattgctagaattgtctaaaaacatcctcatgagctcagcaacagcattatatagtgaagaggataaggcgttttattcaccacgtcagcaaggtgcaggtgtagttgatgctgaaaaagctatccaagctcaatattatgttactggaaacgatggcaaagctaaaattaatctcaaacgagtgggagataaatttgatatcacagttacaattcataaacttgtagaaggtgtcaaagaattgtattatcaagctaatgtagcaacagaacaagtaaataaaggtaaatttgcccttaaaccacaagccttgctagatactaattggcagaaagtaattcttcgtgataaagaaacacaagttcgatttactattgattctagtcaatttagtcagaaattaaaagaacagatggcaaatggttatttcttagaaggttttgtacgttttaaagaagccaaggatagtaatcaggagttaatgagtattccttttgtaggatttaatggtgattttgcgaacttacaagcacttgaaacaccgatttataagacgctttctaaaggtagtttctactataaaccaaatgatacaactcataaagaccaattggagtacaatgaatcagctccttttgaaagcaacaactatactgccttgttaacacaatcagcgtcttggggctatgttgattatgtcaaaaatggtggggagttagaattagcaccggagagtccaaaaagaattattttaggaacttttgagaataaggttgaggataaaacaattcatcttttggaaagagatgcagcgaataatccatattttgccatttctccaaataaagatggaaatagggatgaaatcactccccaggcaactttcttaagaaatgttaaggatatttctgctcaagttctagatcaaaatggaaatgttatttggcaaagtaaggttttaccatcttatcgtaaaaatttccataataatccaaagcaaagtgatggtcattatcgtatggatgcccttcagtggagtggtttagataaggatggcaaagttgtagcagatggtttttatacttatcgtttacgttacacaccagtagcagaaggagcaaatagtcaggagtcagactttaaagttcaagtaagtactaagtcaccaaatcttccttcacgagctcagtttgatgaaactaatcgaacattaagcttagccatgcctaaggaaagtagttatgttcctacatatcgtctacaattagttttatctcatgttgtaaaagatgaagaatatggagatgagacttcttaccattatttccatatagatcgagaaggtaaagtgacacttcctaaaacagttaagataggagagagtgaggttgcagtagaccctaagaccttgacacttgttgtggaagataaagctggtaatttcgcaacggtaaaattgtctgacctcttgaataaggcagtagtatcagagaaagaaaacgctatagtaatttctaacaatttcaaatattttgataacttgaaaaaagaacctatgtttatttctaaagaaggaaaagtagtaaacaagaatctagaagaaatagcattagttaagccgcaaactacagttactactcaatcattgtctaaagaaataactcaatcaggaaatgagaaagtcctcacttctacaaacaataatagtagcagagtagctaagatcatatcacctaaacataacggggattctgttaaccatacc

SEQ ID NO: 433 - DNA, 3498 bp, Streptococcus agalactiae
gaggagcaagaattaaaaaaccaagagcaatcacctgtaattgctaatgttgctcaacagccatcgccatcggtaactactaatactgttgaaaaaacatctgtaacatctgcttctgctagtaatacagcgaaagaaatgggtgatacatctgtaaaaaatgacaaaacagaagatgaattattagaagagttatctaaaaaccttgatacgtctaatttgggggctgatcttgaagaagaatatccctctaaaccagagacaaccaacaataaagaaagcaatgtagtaacaaatgcttcaactgcaatagcacagaaagttccctcagcatatgaagaggtgaagccagaaagcaagtcatcacttgctgttcttgatacatctaaaataacaaaattgcaagccataacccaaagaggaaagggaaatgtagtagctattattgatactggctttgatattaaccatgatatttttcgtttagatagcccaaaagatgataagcacagctttaaaactaaggcagaatttgaggaattaaaagcaaaacataatatcacttatgggaaatgggttaacgataagattgtttttgcacataactacgccaacaatacagaaacggtggctgatattgcagcagctatgaaagatggttatgggtcagaagcaaagaatatttcgcatggtacacacgttgctggtatttttgtaggtaatagtaaacgtccagcaatcaatggtcttcttttagaaggtgcagcgccaaatgctcaagtcttattaatgcgtattccagataaaattgattcggacaaatttggtgaagcatatgctaaagcaatcacagacgctgttaatctaggagcaaaaacgattaatatgagccttggaaaaacagcagattctttaattgctctcaatgataaagttaaattagcacttaaattagcttctgagaagggcgttgcagttgttgtggctgccggaaatgaaggtgcatttggtatggattatagcaaaccattatcaactaatcctgactacggtacggttaatagtccagctatttctgaagatactttgagtgttgctagctatgaatcacttaaaactatcagtgaggtcgttgaaacaactattgaaggtaagttagttaagttgccgattgtgacttctaaaccttttgacaaaggtaaggcctacgatgtggtttatgccaattatggtgcaaaaaaagactttgaaggtaaggactttaaaggtaagattgcattaattgagcgtggtggtggacttgattttatgactaaaatcactcatgctacaaatgcaggtgttgttggtatcgttatttttaacgatcaagaaaaacgtggaaattttctaattccttaccgtgaattacctgtgggggttattagtaaagtagatggcgagcgtataaaaaatacttcaagtcagttaacatttaaccagagttttgaagtagttgatagccaaggtggcaatcgtatgctggaacaatcaagttggggcgtgacagctgaaggagcaatcaagcctgatgtaacagcttctggctttgaaatttattcttcaacctataataatcaataccaaacaatgtctggtacaagtatggcttcaccacatgttgcaggattaatgacaatgcttcaaagtcatttggctgagaaatataaagggatgaatttagattctaaaaaattgctagaattgtctaaaaacatcctcatgagctcagcaacagcattatatagtgaagaggataaggcgttttattcaccacgtcagcaaggtgcaggtgtagttgatgctgaaaaagctatccaagctcaatattatgttactggaaacgatggcaaagctaaaattaatctcaaacgagtgggagataaatttgatatcacagttacaattcataaacttgtagaaggtgtcaaagaattgtattatcaagctaatgtagcaacagaacaagtaaataaaggtaaatttgcccttaaaccacaagccttgctagatactaattggcagaaagtaattcttcgtgataaagaaacacaagttcgatttactattgattctagtcaatttagtcagaaattaaaagaacagatggcaaatggttatttcttagaaggttttgtacgttttaaagaagccaaggatagtaatcaggagttaatgagtattccttttgtaggatttaatggtgattttgcgaacttacaagcacttgaaacaccgatttataagacgctttctaaaggtagtttctactataaaccaaatgatacaactcataaagaccaattggagtacaatgaatcagctccttttgaaagcaacaactatactgccttgttaacacaatcagcgtcttggggctatgttgattatgtcaaaaatggtggggagttagaattagcaccggagagtccaaaaagaattattttaggaacttttgagaataaggttgaggataaaacaattcatcttttggaaagagatgcagcgaataatccatattttgccatttctccaaataaagatggaaatagggatgaaatcactccccaggcaactttcttaagaaatgttaaggatatttctgctcaagttctagatcaaaatggaaatgttatttggcaaagtaaggttttaccatcttatcgtaaaaatttccataataatccaaagcaaagtgatggtcattatcgtatggatgcccttcagtggagtggtttagataaggatggcaaagttgtagcagatggtttttatacttatcgtttacgttacacaccagtagcagaaggagcaaatagtcaggagtcagactttaaagttcaagtaagtactaagtcaccaaatcttccttcacgagctcagtttgatgaaactaatcgaacattaagcttagccatgcctaaggaaagtagttatgttcctacatatcgtctacaattagttttatctcatgttgtaaaagatgaagaatatggagatgagacttcttaccattatttccatatagatcaagaaggtaaagtgacacttcctaaaacagttaagataggagagagtgaggttgcagtagaccctaagaccttgacacttgttgtggaagataaagctggtaatttcgcaacggtaaaattgtctgacctcttgaataaggcagtagtatcagagaaagaaaacgctatagtaatttctaacaatttcaaatattttgataacttgaaaaaagaacctatgtttatttctaaagaaggaaaagtagtaaacaagaatctagaagaaatagcattagttaagccgcaaactacagttactactcaatcattgtctaaagaaataactcaatcaggaaatgagaaagtcctcacttctacaaacaataatagtagcagagtagctaagatcatatcacctaaacataacggggattctgttaaccatacc

SEQ ID NO: 434 - DNA, 3498 bp, Streptococcus agalactiae
gaggagcaagaattaaaaaaccaagagcaatcacctgtaattgctaatgttgctcaacagccatcgccatcggtaactactaatactgttgaaaaaacatctgtaacagctgcttctgctagtaatacagcgaaagaaatgggtgatacatctgtaaaaaatgacaaaacagaagatgaattattagaagagttatctaaaaaccttgatacgtctaatttgggggctgatcttgaagaagaatatccctctaaaccagagacaaccaacaataaagaaagcaatgtagtaacaaatgcttcaactgcaatagcacagaaagttccctcagcatatgaagaggtgaagccagaaagcaagtcatcgcttgctgttcttgatacatctaaaataacaaaattacaagccataacccaaagaggaaagggaaatgtagtagctattattgatactggctttgatattaaccatgatatttttcgtttagatagcccaaaagatgataagcacagctttaaaactaagacagaatttgaggaattaaaagcaaaacataatatcacttatgggaaatgggttaacgataagattgtttttgcacataactacgccaacaatacagaaacggtggctgatattgcagcagctatgaaagatggttatggttcagaagcaaagaatatttcgcatggtacacacgttgctggtatttttgtaggtaatagtaaacgtccagcaatcaatggtcttcttttagaaggtgcagcgccaaatgctcaagtcttattaatgcgtattccagataaaattgattcggacaaatttggtgaagcatatgctaaagcaatcacagacgctgttaatctaggagcaaaaacgattaatatgagtattggaaaaacagctgattctttaattgctctcaatgataaagttaaattagcacttaaattagcttctgagaagggcgttgcagttgttgtggctgccggaaatgaaggcgcatttggtatggattatagcaaaccattatcaactaatcctgactacggtacggttaatagtccagctatttctgaagatactttgagtgttgctagctatgaatcacttaaaactatcagtgaggtcgttgaaacaactattgaaggtaagttagttaagttgccgattgtgacttctaaaccttttgacaaaggtaaggcctacgatgtggtttatgccaattatggtgcaaaaaaagactttgaaggtaaggactttaaaggtaagattgcattaattgagcgtggtggtggacttgattttatgactaaaatcactcatgctacaaatgcaggtgttgttggtatcgttatttttaacgatcaagaaaaacgtggaaattttctaattccttaccgtgaattacctgtggggattattagtaaagtagatggcgagcgtataaaaaatacttcaagtcagttaacatttaaccagagttttgaagtagttgatagccaaggtggtaatcgtatgctggaacaatcaagttggggcgtgacagctgaaggagcaatcaagcctgatgtaacagcttctggctttgaaatttattcttcaacctataataatcaataccaaacaatgtctggtacaagtatggcttcaccacatgttgcaggattaatgacaatgcttcaaagtcatttggctgagaaatataaagggatgaatttagattctaaaaaattgctagaattgtctaaaaacatcctcatgagctcagcaacagcattatatagtgaagaggataaggcgttttattcaccacgtcagcaaggtgcaggtgtagttgatgctgaaaaagctatccaagctcaatattatattactggaaacgatggcaaagctaaaattaatctcaaacgaatgggagataaatttgatatcacagttacaattcataaacttgtagaaggtgtcaaagaattgtattatcaagctaatgtagcaacagaacaagtaaataaaggtaaatttgcccttaaaccacaagccttgctagatactaattggcagaaagtaattcttcgtgataaagaaacacaagttcgatttactattgatgctagtcaatttagtcagaaattaaaagaacagatggcaaatggttatttcttagaaggttttgtacgttttaaagaagccaaggatagtaatcaggagttaatgagtattccttttgtaggatttaatggtgattttgcgaacttacaagcacttgaaacaccgatttataagacgatttctaaaggtagtttctactataaaccaaatgatacaactcataaagaccaattggagtacaatgaatcagctccttttgaaagcaacaactatactgccttgttaacacaatcagcgtcttggggctatgttgattatgtcaaaaatggtggggagttagaattagcaccggagagtccaaaaagaattattttaggaacttttgagaataaggttgaggataaaacaattcatcttttggaaagagatgcagcgaataatccatattttgccatttctccaaataaagatggaaatagggacgaaatcactccccaggcaactttcttaagaaatgttaaggatatttctgctcaagttctagatcaaaatggaaatgttatttggcaaagtaaggttttaccatcttatcgtaaaaatttccataataatccaaagcaaagtgatggtcattatcgtatggatgctcttcagtggagtggtttagataaggatggcaaagttgtagcagatggtttttatacttatcgcttacgttacacaccagtagcagaaggagcaaatagtcaggagtcagactttaaagtacaagtaagtactaagtcaccaaatcttccttcacgagctcagtttgatgaaactaatcgaacattaagcttagccatgcctaaggaaagtagttatgttcctacatatcgtttacaattagttttatctcatgttgtaaaagatgaagaatatggggatgagacttcttaccattatttccatatagatcaagaaggtaaagtgacacttcctaaaacggttaagataggagagagtgaggttgcggtagaccctaaggccttgacacttgttgtggaagataaagctggtaatttcgcaacggtaaaattgtctgatctcttgaataaggcagtagtatcagagaaagaaaacgctatagtaatttctaacagtttcaaatattttgataacttgaaaaaagaacctatgtttatttctaaaaaagaaaaagtagtaaacaagaatctagaagaaataatattagttaagccgcaaactacagttactactcaatcattgtctaaagaaataactaaatcaggaaatgagaaagtcctcacttctacaaacaataatagtagcagagtagctaagatcatatcacctaaacataacggggattctgttaaccatacc

SEQ ID NO: 435 - DNA, 3497 bp, Streptococcus agalactiae
gaggagcaagaattaaaaaaccaagagcaatcacctgtaattgctaatgttgctcaacagccatcgccatcggtaactactaatattgttgaaaaaacatctgtaacagctgcttctgctagtaatacagtgaaagaaatgggtgatacatctgtaaaaaatgacaaaacagaagatgaattattagaagagttatctaaaaaccttgatacgtctaatttgggggctgatcttgaagaagaatatccctctaaaccagagacaaccaacaataaagaaagcaatgtagtaacaaatgcttcaactgcaatagcacagaaagttccctcagcatatgaagaggtgaagtcagaaagcaagtcatcgcttgctgttcttgatacatctaaaataacaaaattacaagccacaacccaaagaggaaagggaaatgtagtagctattattgatactggctttgatattaaccatgatatttttcgtttagatagcccaaaagatgataagcacagctttaaaactaaggcagaatttgaggaattaaaagcaaaacataatatcacttatgggaaatgggttaacgataagattgtttttgcacataactacgccaacaatacagaaacggtggctgatattgcagcagctatgaaagatggttatgggtcagaagcaaagaatattttgcatggtacacacgttgctggtatttttgtaggtaatagtaaacgtccagcaatcaatagtcttcttttagaaggtgcagcgccaaatgctcaagtcttattaatgcgtattccagataaaattgattcggacaaatttggagaagcatatgctaaagcaatcatagacgctgttaatctaggagcaaaaacgattaatatgagcctgggaaaaacggctgattctttaattgctctcaatgataaagttaaattagcacttaaattagcttctgagaagggcgttgcagttgttgtggctgccggaaatgaaggtgcatttggtatggattatagcaaaccattatcaactaatcctgactacggtacggttaatagtccagctatttctgaagatactttgagtgttgctagctatgaatcacttaaaactatcagtgaggtcgttgaaacaactattgaaggtaagttagttaagttgccgattgtgacttctaaaccttttgacaaaggtaaggcctacgatgtggtttatgccaattatggtgcaaaaaagattttgaaggtaaggactttaaaggtaagattgcattaattgagcgtggtggtggacttgattttatgactaaaatcactcatgctacaaatgcaggtgttgttggtatcgttatttttaacgatcaagaaaaacgtggaaattttctaattccttaccgtgaattacctgtgggggttattagtaaagtagatggcgagcgtataaaaaatacttcaagtcagttaacatttaaccagagttttgaagtagttgatagccaaggtggcaatcgtatgctggaacaatcaagttggggcgtgacagctgaaggagcaatcaagcctgatgtaacagcttctggctttgaaatttattcttcaacctataataatcaatactaaacaatgtctggtacaagtatggcttcaccacatgttgcaggattaatgacaatgcttcaaagtcatttggctgagaaatataaagggatgaatttagattctaaaaaattgctagaattgtctaaaaacatcctcatgagctcagcaacagcattatatagtgaagaggataaggcgttttattcaccacgtcagcaaggtgcaggtgtagttgatgctgaaaaagctatccaagctcaatattatgttactggaaacgatggcaaagttaaaattaatctcaaacgagagggagataaatttgatatcacagttacaattcataaacttgtagaaggtgtcaaagaattgtattatcaagctaatgtagcaacagaacaagtaaataaaggtaaatttgcccttaaaccacaagccttgctagatactaattggcagaaagtaattcttcgtgataaagaaacacaagttcgatttactattgatgctagtcaatttagtcagaaattaaaagaacagatggcaaatggttatttcttagaaggttttgtacgttttaaagaagccaaggatagtaatcaggagttaatgagtattccttttgtaggatttaatggtgattttgcgaacttacaagcacttgaaacaccgatttataagacgctttctaaaggtagtttctactataaaccaaatgatacaactcataaagaccaattggagtacaatgaatcagctccttttgaaagcaacaactatactgccttgttaacacaatcagcgtcttggggctatgttgattatgtcaaaaatggtggggagttagaattagcaccggagagtccaaaaagaattattttaggaacttttgagaataaggttgaggataaaacaattcatcttttggaaagagatgcagcgaataatccatattttgccatttctccaaataaagatggaaatagggacgaaatcactccccaggcaactttcttaagaaatgttaaggatatttctgctcaagttctagatcaaaatggaaatgttatttggcaaagtaaggttttaccatcttatcgtaaaaatttccataataatccaaagcaaagtgatggtcattatcgtatggatgctcttcagtggagtggtttagataaggatggcaaagttgtagcagatggtttttatacttatcgcttacgttacacaccagtagcagaaggagcaaatagtcaggagtcagactttaaagttcaagtaagtactaagtcaccaaatcttccttcacgagctcagtttgatgaaactaatcgaacattaagcttagccatgcctaaggaaagtagttatgttcctacatatcgtttacaattagttttatctcatgttgtaaaagatgaagaatatggggatgagacttcttaccattatttccatatagatcaagaaggtaaagtgacacttcctaaaacggttaagataggagagagtgaggttgcggtagaccctaaggccttgacacttgttgtggaagataaagctggtaattttgcaacggtaaaattgtctgacctcttgaataaggcagtagtatcagagaaagaaaacgctatagtaatttctaacagtttcaaatattttgataacttgaagaaagaacctatgtttatttctaaagaaggaaaagtagtaaacaagaatctagaagaaataacattagttaagcctcaaactacagttactactcaatcattgtctaaagaaataactaaatcaggaaatgagaaagtcctcacttctacaaacaataatagtagcagagtagctaagatcatatcacctaaacataacggggattctgttaaccatacc

SEQ ID NO: 436 - DNA, 3497 bp, Streptococcus agalactiae; identical to SEQ ID NO: 435

SEQ ID NO: 437 - DNA, 3497 bp, Streptococcus agalactiae; identical to SEQ ID NO: 435

SEQ ID NO: 438 - DNA, 3498 bp, Streptococcus agalactiae
  misc_feature 106: n = A,T,C or G
gaggagcaagaattaaaaaaccaagagcaatcacctgtaattgctaatgttgctcaacagccatcgccatcggtaactactaatattgttgaaaaaacatctgtancagctgcttctgctagtaatacagcgaaagaaatgggtgatacatctgtaaaaaatgacaaaacagaagatgaattattagaagagttatctaaaaaccttgatacgtctaatwtgggggctgatcttgaagaagaatatccctctaaaccagagacaaccaacaataaagaaagcaatgtagtaacaaatgcttcaactgcaatagcacagaaagttccctcagcgtatgaagaggtgaagccagaaagcaagtcatcgcttgctgtttttgatacatctaaaataacaaaattgcaagccataacccaaagaggaaagggaaatgtagtagctattattgatactggctttgatattaaccatgatatttttcgtttagatagcccaaaagatgataagcacagctttaaaactaaagcagaattcgaggaattaaaagcaaaacataatatcacttatgggaaatgggttaacgataagattgtttttgcacataactacgccaacaatacagaaacggtggctgatattgcagcagctatgaaagatggttatgggtcagaagcaaagaatatttcgcatggtacacacgttgctggtatttttgtaggtaatagtaaacgtccagcaatcaatggtcttcttttagaaggtgcagcgccaaatgctcaagtcttattaatgcgtattccagataaaattgattcggacaaatttggagaagcatatgctaaagcaatcacagacgctgttaatctaggagcaaaaacgattaatatgagccttggaaaaacagcagattctttaattgcactcaatgataaagttaaattagcacttaaattagcttctgagaagggcgttgcagttgttgtggctgccggaaatgaaggtgcatttggtatggattatagcaaaccattatcaactaatcctgactacggtacggttaatagtccagctatttctgaagatactttgagtgttgctagctatgaatcacttaaaactatcagtgaggtcgttgaaacaactattgaaggtaagttagttaagttgccgattgtgacttctaaaccttttgacaaaggtaaggcctacgatgtggtttatgccaattatggtgcaaaaaaagactttgaaggtaaggactttaaaggtaagattgcattaattgagcgtggtggtggacttgattttatgactaaaatcactcatgctacaaatgcaggtgttgttggtatcgttatttttaacgatcaagaaaaacgtggaaattttctaattccttaccgtgaattacctgtgggggttattagtaaagtagatggcgagcgtataaaaaatacttcaagtcagttaacatttaaccagagttttgaagtagttgatagccaaggtggcaatcgtatgctggaacaatcaagttggggcgtgacagctgaaggagcaatcaagcctgatgtaacagcttctggctttgaaatttattcttcaacctataataatcaataccaaacaatgtctggtacaagtatggcttcaccacatgttgcaggattaatgacaatgcttcaaaatcatttggctgagaaatataaagggatgaatttagattctaaaaaattgctagaattgtctaaaaacatcctcatgagctcagcaacagcattatatagtgaagaggataaggcgttttattcaccacgtcagcaaggtgcaggtgtagttgatgctgaaaaagctatccaagctcaatattatgttactggaaacgatggcaaagctaaaattaatctcaaacgagtgggagataaatttgatatcacagttacaattcataaacttgtagaaggtgtcaaagaattgtattatcaagctaatgtagcaacagaacaagtaaataaaggtaaatttgcccttaaaccacaagccttgctagatactaattggcagaaagtaattcttcgtgataaagaaacacaagttcgatttactattgatgctagtcaatttagtcagaaattaaaagaacagatggcaaatggttatttcttagaaggttttgtacgttttaaagaagccaaggatagtaatcaggagttaatgagtattccttttgtaggatttaatggtgattttgcgaacttacaagcacttgaaacaccgatttataagacgctttctaaaggtagtttctactataaaccaaatgatacaactcataaagaccaattggagtacaatgaatcagctccttttgaaagcaacaactatactgccttgttaacacaatcagcgtcttggggctatgttgattatgtcaaaaatggtggggagttagaattagcaccggagagtccaaaaagaattattttaggaacttttgagaataaggttgaggataaaacaattcatcttttggaaagagatgcagcgaataatccatattttgccatttctccaaataaagatggaaatagggatgaaatcactccccaggcaactttcttaagaaatgttaaggatatttctgctcaagttctagatcaaaatggaaatgttatttggcaaagtaaggttttaccatcttatcgtaaaaatttccataataatccaaagcaaagtgatggtcattatcgtatggatgcctttcagtggagtggtttagataaggatggcaaagttgtagcagatggtttttatacttatcgcctacgttacacaccagtagcagaaggagcaaatagtcaggagtcagactttaaagttcaagtaagtactaagtcaccaaatcttcctttactagctcagtttgatgaaactaatcgaacattaagcttagccatgcctaaggaaagtagttatgttcctacatatcgtttacaattagttttatctcatgttgtaaaagatgaagaatatggggatgagacttcttaccattatttccatatagatcaagaaggtaaagtgacacttcctaaaacggttaagataggagagagtgaggttgcagtagaccctaaggccttgacacttgttgtggaagataaagctggtaattttgcaacggtaaaattgtctgacctcttgaataaggcagtagtatcagagaaagaaaacgctatagtaatttctaacagtttcaaatattttgataacttgaaaaaagaatctatgtttatttctaaagaaggaaaagtagtaaacaagaatctagaagaaataacattagttaagccgcaaactacagttactactcaatcattgtctaaagaaataactaaatcaggaaatgagaaagtcctcacttctacaaacaataatagtagcagagtagctaagatcatatcacctaaacataacggggattctgttaaccatacc

SEQ ID NO: 439 - DNA, 3498 bp, Streptococcus agalactiae
gaggagcaagaattaaaaaaccaagagcaatcacctgtaattgctaatgttgctcaacagccatcgccatcggtaactactaatattgttgaaaaaacatctgtaacagctgcttctgctagtaatacagcgaaagaaatgggtgatacatctgtaaaaaatgacaaaacagaagatgaattattagaagagttatctaaaaaccttgatacgtctaatatgggggctgatcttgaagaagaatatccctctaaaccagagacaaccaacaataaggaaagcaatgtagtaacaaatgcttcaactgcaatagcacagaaagttccctcagcatatgaagaggtgaagccaaaaagcaagtcatcgcttgctgttcttgatacatctaaaataacaaaattgcaagccataacccaaagaggaaagggaaatgtagtagctattattgatactggctttgatattaaccatgatatttttcgtttagatagcccaaaagatgataagcacagctttaaaaataaggcagaattcgaggaattaaaagcaaaacataatatcacttatgggaaatgggttaacgataagattgtttttgcacataactacgccaacaatacagaaacggtggctgatattgcagcagctatgaaagatggttatggttcagaagcaaagaatatttcgcatggtacacacgttgctggtatttttgtaggtaatagtaaacgtccagcaatcaatggtcttcttttagaaggtgcagcgccaaatgctcaagtcttattaatgcgtattccagataaaattgattcggacaaatttggagaagcatatgctaaagcaatcacagacgctgttaatctaggagctaaaacgattaatatgagtattggaaaaacagctgattctttaattgctctcaatgataaagttaaattagcacttaaattagcttctgagaagggcgttgcagttgttgtggctgccggaaatgaaggcgcatttggtatggattatagcaaaccgttatcaactaatcctgactacggtacggttaatagtccagctatttctgaagatactttgagtgttgctagctatgaatcacttaaaactatcagtgaggtcgttgaaacaactattgaaggtaagttagttaagttgccgattgtgacttctaaaccttttgacaaaggtaaggcctacgatgtggtttatgccaattatggtgcaaaaaaagactttgaaggtaaggactttaaaggtaagattgcattaattgagcgtggtggtggacttgattttatgactaaaatcactcatgctacaaatgcaggtgttgttggtatcgttatttttaacgatcaagaaaaacgtggaaattttctaattccttaccgtgaattacctgtgggggttattagtaaagtagatggcgagcgtataaaaaatacttcaagtcagttaacatttaaccagagatttgaagtagttgatagccaaggtggcaatcgtatgctggaacaatcaagttggggcgtgacagctgaaggagcaatcaagcctgatgtaacagcttctggcttcgaaatttattcttcaacctataataatcaataccaaacaatgtctggtacaagtatggcttcaccacatgttgcaggattaatgacaatgcttcaaagtcatttggctgagaaatataaagggatgaatttagattctaaaaaattgctagaattgtctaaaaacatcctcatgagctcagcaacagcattatatagtgaagaggataaggcgttttattcaccacgtcagcaaggtgcaggtgtagttgatgctgaaaaagctatccaagctcaatattatgttactggaaacgatggcaaagctaaaattaatctcaaacgagtgggagataaatttgatatcacagttacaattcataaacttgtagaaggtgtcaaagaattgtattatcaagctaatgtagcaacagaacaagtaaataaaggtaaatttgcccttaaaccacaagccttgctagatactaattggcagaaagtaattcttcgtgataaagaaacacaagttcgatttactattgatgctagtcaatttagtcagaaattaaaagaacagatggcaaatggttatttcttagaaggttttgtacgttttaaagaagctaaggatagtaatcaggagttaatgagtattccttttgtaggatttaatggtgattttgcgagcttacaagcacttgaaacaccgatttataagacgctttctaaaggtagtttctactataaaccaaatgatacaactcataaagaccaattggagtataatgaatcagctccttttgaaagcaacaactatactgccttgttaacacaatcagcgtcttggggctatgttgattatgtcaaaaatggtggggagttagaattagcaccggagagtccaaaaagaattattttaggaacttttgagaataaggttgaggataaaacaattcatcttttggaaagagatgcagcgaataatccatattttgccatttctccaaataaagatggaaatagggatgaaatcactccccaggcaactttcttaagaaatgttaaggatatttctgctcaagttctagatcaaaatggaaatgttatttggcaaagtaaggttttaccatcttatcgtaaaaatttccataataatccaaagcagagtgatggtcattatcgtatggatgcccttcagtggagtggtttagataaggatggcaaagttgtagcagatggtttttatacttatcgcttacgttacacaccagtagcagaaggagcaaatagtcaggagtcagactttaaagttcaagtaagtactaagtcaccaaatcttccttcacgagctcagtttgatgaaactaatcgaacattaagcttagccatgcctaagggaagtagttatgttcctatatatcgtctacaattagttttatctcatgttgtaaaagatgaagaatatggagatgagacttcttactattatttccatatagatcaagaaggtaaagcgacacttcctaaaacggttaagataggagagagtgaggttgcagtagaccctaaggccttgacacttgttgtggaagataaagctggtaatttcgcaacggtaaaattgtctgacctcttgaataaggcagtagtatcagagaaagaaaacgctatagtaatttctaacagtttcaaatattttgataacttgaaaaaagaacctatgtttatttctaaaaaagaaaaagtagtaaacaagaatctagaagaaataatattagttaagccgcacactacagttactactcaatcattgtctaaagaaataactaaatcaggaaatgagaaagtcctcacttctacaaacaataatagtagtagagtagctaaaatcatatcacctaaacataatggggattctgttaaccatacc

SEQ ID NO: 440 - DNA, 3498 bp, Streptococcus agalactiae
gaggagcaagaattaaaaaaccaagagcaatcacctgtaattgctaatgttgctcaacagccatcgccatcggtaactactaatactgttgaaaaaacatctgtaacagctgcttctgctagtaatacagcgaaagaaatgggtgatacatctgtaaaaaatgacaaaacagaagatgaattattagaagagttatctaaaaaccttgatacgtctaatttgggggctgatcttgaagaagaatatccctctaaaccagagacaaccaacaataaagaaagcaatgtagtaacaaatgcttcaactgcaatagcacagaaagttccctcagcatatgaagaggtgaagccagaaagcaagtcatcgcttgctgttcttgatacatctaaaataacaaaattacaagccataacccaaagaggaaagggaaatgtagtagctattattgatactggctttgatattaaccatgatatttttcgtttagatagcccaaaagatgataagcacagctttaaaactaagacagaatttgaggaattaaaagcaaaacataatatcacttatgggaaatgggttaacgataagattgtttttgcacataactacgccaacaatacagaaacggtggctgatattgcagcagctatgaaagatggttatggttcagaagcaaagaatatttcgcatggtacacacgttgctggtatttttgtaggtaatagtaaacgtccagcaatcaatggtcttcttttagaaggtgcagcgccaaatgctcaagtcttattaatgcgtattccagataaaattgattcggacaaatttggtgaagcatatgctaaagcaatcacagacgctgttaatctaggagcaaaaacgattaatatgagtattggaaaaacagctgattctttaattgctctcaatgataaagttaaattagcacttaaattagcttctgagaagggcgttgcagttgttgtggctgccggaaatgaaggcgcatttggtatggattatagcaaaccattatcaactaatcctgactacggtacggttaatagtccagctatttctgaagatactttgagtgttgctagctatgaatcacttaaaactatcagtgaggtcgttgaaacaactattgaaggtaagttagttaagttgccgattgtgacttctaaaccttttgacaaaggtaaggcctacgatgtggtttatgccaattatggtgcaaaaaaagactttgaaggtaaggactttaaaggtaagattgcattaattgagcgtggtggtggacttgattttatgactaaaatcactcatgctacaaatgcaggtgttgttggtatcgttatttttaacgatcaagaaaaacgtggaaattttctaattccttaccgtgaattacctgtggggattattagtaaagtagatggcgagcgtataaaaaatacttcaagtcagttaacatttaaccagagttttgaagtagttgatagccaaggtggtaatcgtatgctggaacaatcaagttggggcgtgacagctgaaggagcaatcaagcctgatgtaacagcttctggctttgaaatttattcttcaacctataataatcaataccaaacaatgtctggtacaagtatggcttcaccacatgttgcaggattaatgacaatgcttcaaagtcatttggctgagaaatataaagggatgaatttagattctaaaaaattgctagaattgtctaaaaacatcctcatgagctcagcaacagcattatatagtgaagaggataaggcgttttattcaccacgtcagcaaggtgcaggtgtagttgatgctgaaaaagctatccaagctcaatattatattactggaaacgatggcaaagctaaaattaatctcaaacgaatgggagataaatttgatatcacagttacaattcataaacttgtagaaggtgtcaaagaattgtattatcaagctaatgtagcaacagaacaagtaaataaaggtaaatttgcccttaaaccacaagccttgctagatactaattggcagaaagtaattcttcgtgataaagaaacacaagttcgatttactattgatgctagtcaatttagtcagaaattaaaagaacagatggcaaatggttatttcttagaaggttttgtacgttttaaagaagccaaggatagtaatcaggagttaatgagtattccttttgtaggatttaatggtgattttgcgaacttacaagcacttgaaacaccgatttataagacgctttctaaaggtagtttctactataaaccaaatgatacaactcataaagaccaattggagtacaatgaatcagctccttttgaaagcaacaactatactgccttgttaacacaatcagcgtcttggggctatgttgattatgtcaaaaatggtggggagttagaattagcaccggagagtccaaaaagaattattttaggaacttttgagaataaggttgaggataaaacaattcatcttttggaaagagatgcagcgaataatccatattttgccatttctccaaataaagatggaaatagggacgaaatcactccccaggcaactttcttaagaaatgttaaggatatttctgctcaagttctagatcaaaatggaaatgttatttggcaaagtaaggttttaccatcttatcgtaaaaatttccataataatccaaagcaaagtgatggtcattatcgtatggatgctcttcagtggagtggtttagataaggatggcaaagttgtagcagatggtttttatacttatcgcttacgttacacaccagtagcagaaggagcaaatagtcaggagtcagactttaaagtacaagtaagtactaagtcaccaaatcttccttcacgagctcagtttgatgaaactaatcgaacattaagcttagccatgcctaaggaaagtagttatgttcctacatatcgtttacaattagttttatctcatgttgtaaaagatgaagaatatggggatgagacttcttaccattatttccatatagatcaagaaggtaaagtgacacttcctaaaacggttaagataggagagagtgaggttgcggtagaccctaaggccttgacacttgttgtggaagataaagctggtaatttcgcaacggtaaaattgtctgatctcttgaataaggcagtagtatcagagaaagaaaacgctatagtaatttctaacagtttcaaatattttgataacttgaaaaaagaacctatgtttatttctaaaaaagaaaaagtagtaaacaagaatctagaagaaataatattagttaagccgcaaactacagttactactcaatcattgtctaaagaaataactaaatcaggaaatgagaaagtcctcacttctacaaacaataatagtagcagagtagctaagatcatatcacctaaacataacggggattctgttaaccatacc

SEQ ID NO: 441 - protein, 1233 aa, Streptococcus agalactiae
VDKHHSKKAILKLTLITTSILLMHSNQVNAEEQELKNQEQSPVIANVAQQPSPSVTTNTVEKTSVTAASASNTAKEMGDTSVKNDKTEDELLEELSKNLDTSNLGADLEEEYPSKPETTNNKESNVVTNASTAIAQKVPSAYEEVKPESKSSLAVLDTSKITKLQAITQRGKGNVVAIIDTGFDINHDIFRLDSPKDDKHSFKTKTEFEELKAKHNITYGKWVNDKIVFAHNYANNTETVADIAAAMKDGYGSEAKNISHGTHVAGIFVGNSKRPAINGLLLEGAAPNAQVLLMRIPDKIDSDKFGEAYAKAITDAVNLGAKTINMSIGKTADSLIALNDKVKLALKLASEKGVAVVVAAGNEGAFGMDYSKPLSTNPDYGTVNSPAISEDTLSVASYESLKTISEVVETTIEGKLVKLPIVTSKPFDKGKAYDVVYANYGAKKDFEGKDFKGKIALIERGGGLDFMTKITHATNAGVVGIVIFNDQEKRGNFLIPYRELPVGIISKVDGERIKNTSSQLTFNQSFEVVDSQGGNRMLEQSSWGVTAEGAIKPDVTASGFEIYSSTYNNQYQTMSGTSMASPHVAGLMTMLQSHLAEKYKGMNLDSKKLLELSKNILMSSATALYSEEDKAFYSPRQQGAGVVDAEKAIQAQYYITGNDGKAKINLKRMGDKFDITVTIHKLVEGVKELYYQANVATEQVNKGKFALKPQALLDTNWQKVILRDKETQVRFTIDASQFSQKLKEQMANGYFLEGFVRFKEAKDSNQELMSIPFVGFNGDFANLQALETPIYKTLSKGSFYYKPNDTTHKDQLEYNESAPFESNNYTALLTQSASWGYVDYVKNGGELELAPESPKRIILGTFENKVEDKTIHLLERDAANNPYFAISPNKDGNRDEITPQATFLRNVKDISAQVLDQNGNVIWQSKVLPSYRKNFHNNPKQSDGHYRMDALQWSGLDKDGKVVADGFYTYRLRYTPVAEGANSQESDFKVQVSTKSPNLPSRAQFDETNRTLSLAMPKESSYVPTYRLQLVLSHVVKDEEYGDETSYHYFHIDQEGKVTLPKTVKIGESEVAVDPKALTLVVEDKAGNFATVKLSDLLNKAVVSEKENAIVISNSFKYFDNLKKEPMFISKKEKVVNKNLEEIILVKPQTTVTTQSLSKEITKSGNEKVLTSTNNNSSRVAKIISPKHNGDSVNHTLPSTSDRATNGLFVGTLALLSSLLLYLKPKKTKNNSK

SEQ ID NO: 442 - protein, 1166 aa, Streptococcus agalactiae
  VARIANT 417, 419, 422, 424, 429, 435, 439, 455, 469, 476, 477, 493,497, 500, 501, 518, 524, 531, 538, 539, 567, 570, 577, 584,596, 597, 600, 614, 616, 633, 635, 642, 644, 651, 664, 672,674, 678, 686, 694, 695, 704, 706, 709, 729, 734, 735: Xaa = Any Amino Acid
  VARIANT 747, 749, 757, 762, 766, 768, 772, 775, 779, 786, 791, 809,833, 835, 837, 839, 851, 860, 864, 866, 878, 896, 903, 907,908, 913, 928, 953, 959, 965, 976, 977, 979, 988, 991, 1009,1014, 1027, 1032, 1035, 1040, 1046, 1055, 1058, 1066: Xaa = Any Amino Acid
  VARIANT 1070, 1084, 1090, 1091, 1101, 1117, 1129, 1137, 1146, 1147,1148, 1152, 1157, 1159, 1164: Xaa = Any Amino Acid
EEQELKNQEQSPVIANVAQQPSPSVTTNTVEKTSVTSASASNTAKEMGDTSVKNDKTEDELLEELSKNLDTSNLGADLEEEYPSKPETTNNKESNVVTNASTAIAQKVPSAYEEVKPESKSSLAVLDTSKITKLQAITQRGKGNVVAIIDTGFDINHDIFRLDSPKDDKHSFKTKAEFEELKAKHNITYGKWVNDKIVFAHNYANNTETVADIAAAMKDGYGSEAKNISHGTHVAGIFVGNSKRPAINGLLLEGAAPNAQVLLMRIPDKIDSDKFGEAYAKAITDAVNLGAKTINMSLGKTADSLIALNDKVKLALKLASEKGVAVVVAAGNEGAFGMDYSKPLSTNPDYGTVNSPAISEDTLSVASYESLKTISEVVETTIEGKLVKLPIVTSKPFDKGKAYDVVYANYGAKKRLXRXGLXRXDCINXAWWWTXFYDXNHSCYKCRCCWYRYFXRSRKTWKFSNSLPXITCGGYXXSRWRAYKKYFKSVNIXPEFXSSXXPRWQSYAGTIKLGRDSXRSNQAXCNSFWLXNLFFNLXXSIPNNVWYKYGFTTCCRINDNASKSFGXEIXRDEFRFXKIARIVXKHPHELSNSIIXXRGXGVLFTTSARCRCSXCXKSYPSSILCYWKRWQSXNXSQTSGRXIXYHSYNSXTCRRCQRIVLSSXCSNRTSKXRXICPXTTSLARYXLAESNSSXXRNTSSIYYXFXSIXSEIKRTDGKWLFLRRFCTFXRSQGXXSGVNEYSFCRIXWXFCELTSTXNTDLXDAFXRXFLLXTKXYNSXRPIGVQXISSFXKQQLYCLVNTISVLGLCXLCQKWWGVRISTGESKKNYFRNFXEXGXGXNNSSFGKRCSEXSIFCHFSKXRWKXGXNHSPGNFLKKCXGYFCSSSRSKWKCYLAKXGFTILSXKFPXXSKAKXWSLSYGCPSVEWFRXGWQSCSRWFLYLSFTLHTSSRRSKXSGVRLXSSSKYXVTKSSFTSSVXXNXSNIKLSHAXGKXLCSYISSTISFISCCKRXRIWRXDFLPLFPYRSRRXSDTSXNSXDRREXGCSRPXDLDTCCGRXSWXFRNGKIVXPLEXGSSIRERKRYSNFXQFQIFXXLEKRTYVYFXRRKSSKQESRRNSISXAANYSYYSIIVXRNNSIRKXESPHFYKQXXXQSSXDHITXTXRGFCXPY

SEQ ID NO: 443 - protein, 1166 aa, Streptococcus agalactiae
EEQELKNQEQSPVIANVAQQPSPSVTTNTVEKTSVTSASASNTAKEMGDTSVKNDKTEDELLEELSKNLDTSNLGADLEEEYPSKPETTNNKESNVVTNASTAIAQKVPSAYEEVKPESKSSLAVLDTSKITKLQAITQRGKGNVVAIIDTGFDINHDIFRLDSPKDDKHSFKTKAEFEELKAKHNITYGKWVNDKIVFAHNYANNTETVADIAAAMKDGYGSEAKNISHGTHVAGIFVGNSKRPAINGLLLEGAAPNAQVLLMRIPDKIDSDKFGEAYAKAITDAVNLGAKTINMSLGKTADSLIALNDKVKLALKLASEKGVAVVVAAGNEGAFGMDYSKPLSTNPDYGTVNSPAISEDTLSVASYESLKTISEVVETTIEGKLVKLPIVTSKPFDKGKAYDVVYANYGAKKDFEGKDFKGKIALIERGGGLDFMTKITHATNAGVVGIVIFNDQEKRGNFLIPYRELPVGVISKVDGERIKNTSSQLTFNQSFEVVDSQGGNRMLEQSSWGVTAEGAIKPDVTASGFEIYSSTYNNQYQTMSGTSMASPHVAGLMTMLQSHLAEKYKGMNLDSKKLLELSKNILMSSATALYSEEDKAFYSPRQQGAGVVDAEKAIQAQYYVTGNDGKAKINLKRVGDKFDITVTIHKLVEGVKELYYQANVATEQVNKGKFALKPQALLDTNWQKVILRDKETQVRFTIDSSQFSQKLKEQMANGYFLEGFVRFKEAKDSNQELMSIPFVGFNGDFANLQALETPIYKTLSKGSFYYKPNDTTHKDQLEYNESAPFESNNYTALLTQSASWGYVDYVKNGGELELAPESPKRIILGTFENKVEDKTIHLLERDAANNPYFAISPNKDGNRDEITPQATFLRNVKDISAQVLDQNGNVIWQSKVLPSYRKNFHNNPKQSDGHYRMDALQWSGLDKDGKVVADGFYTYRLRYTPVAEGANSQESDFKVQVSTKSPNLPSRAQFDETNRTLSLAMPKESSYVPTYRLQLVLSHVVKDEEYGDETSYHYFHIDQEGKVTLPKTVKIGESEVAVDPKTLTLVVEDKAGNFATVKLSDLLNKAVVSEKENAIVISNNFKYFDNLKKEPMFISKEGKVVNKNLEEIALVKPQTTVTTQSLSKEITQSGNEKVLTSTNNNSSRVAKIISPKHNGDSVNHT

SEQ ID NO: 444 - protein, 1166 aa, Streptococcus agalactiae
EEQELKNQEQSPVIANVAQQPSPSVTTNTVEKTSVTAASASNTAKEMGDTSVKNDKTEDELLEELSKNLDTSNLGADLEEEYPSKPETTNNKESNVVTNASTAIAQKVPSAYEEVKPESKSSLAVLDTSKITKLQAITQRGKGNVVAIIDTGFDINHDIFRLDSPKDDKHSFKTKTEFEELKAKHNITYGKWVNDKIVFAHNYANNTETVADIAAAMKDGYGSEAKNISHGTHVAGIFVGNSKRPAINGLLLEGAAPNAQVLLMRIPDKIDSDKFGEAYAKAITDAVNLGAKTINMSIGKTADSLIALNDKVKLALKLASEKGVAVVVAAGNEGAFGMDYSKPLSTNPDYGTVNSPAISEDTLSVASYESLKTISEVVETTIEGKLVKLPIVTSKPFDKGKAYDVVYANYGAKKDFEGKDFKGKIALIERGGGLDFMTKITHATNAGVVGIVIFNDQEKRGNFLIPYRELPVGIISKVDGERIKNTSSQLTFNQSFEVVDSQGGNRMLEQSSWGVTAEGAIKPDVTASGFEIYSSTYNNQYQTMSGTSMASPHVAGLMTMLQSHLAEKYKGMNLDSKKLLELSKNILMSSATALYSEEDKAFYSPRQQGAGVVDAEKAIQAQYYITGNDGKAKINLKRMGDKFDITVTIHKLVEGVKELYYQANVATEQVNKGKFALKPQALLDTNWQKVILRDKETQVRFTIDASQFSQKLKEQMANGYFLEGFVRFKEAKDSNQELMSIPFVGFNGDFANLQALETPIYKTISKGSFYYKPNDTTHKDQLEYNESAPFESNNYTALLTQSASWGYVDYVKNGGELELAPESPKRIILGTFENKVEDKTIHLLERDAANNPYFAISPNKDGNRDEITPQATFLRNVKDISAQVLDQNGNVIWQSKVLPSYRKNFHNNPKQSDGHYRMDALQWSGLDKDGKVVADGFYTYRLRYTPVAEGANSQESDFKVQVSTKSPNLPSRAQFDETNRTLSLAMPKESSYVPTYRLQLVLSHVVKDEEYGDETSYHYFHIDQEGKVTLPKTVKIGESEVAVDPKALTLVVEDKAGNFATVKLSDLLNKAVVSEKENAIVISNSFKYFDNLKKEPMFISKKEKVVNKNLEEIILVKPQTTVTTQSLSKEITKSGNEKVLTSTNNNSSRVAKIISPKHNGDSVNHT

SEQ ID NO: 445 - protein, 1165 aa, Streptococcus agalactiae
  VARIANT 427, 437, 464, 478, 483, 490, 498, 515, 525, 557, 558, 572,574, 580, 588, 612, 653, 665, 670, 683, 690, 712, 722, 738,739, 744, 799, 817, 819, 829, 874, 885, 926, 933, 947, 962,982, 984, 1000, 1006, 1022, 1028, 1036, 1043, 1048: Xaa = Any Amino Acid
  VARIANT 1062, 1068, 1072, 1080, 1081, 1092, 1105, 1106, 1110, 1113,1115, 1131, 1150: Xaa = Any Amino Acid
EEQELKNQEQSPVIANVAQQPSPSVTTNIVEKTSVTAASASNTVKEMGDTSVKNDKTEDELLEELSKNLDTSNLGADLEEEYPSKPETTNNKESNVVTNASTAIAQKVPSAYEEVKSESKSSLAVLDTSKITKLQATTQRGKGNVVAIIDTGFDINHDIFRLDSPKDDKHSFKTKAEFEELKAKHNITYGKWVNDKIVFAHNYANNTETVADIAAAMKDGYGSEAKNILHGTHVAGIFVGNSKRPAINSLLLEGAAPNAQVLLMRIPDKIDSDKFGEAYAKAIIDAVNLGAKTINMSLGKTADSLIALNDKVKLALKLASEKGVAVVVAAGNEGAFGMDYSKPLSTNPDYGTVNSPAISEDTLSVASYESLKTISEVVETTIEGKLVKLPIVTSKPFDKGKAYDVVYANYGAKKILKVRTLKVRLHXLSVVVDLILXLKSLMLQMQVLLVSLFLTIKKNVEIFXFLTVNYLWGLLVKXMASVXKILQVSXHLTRVLKXLIAKVAIVCWNNQVGAXQLKEQSSLMXQLLALKFILQPIIINTKQCLVQVWLHHMLQDXXQCFKVIWLRNIKGXIXILKNCXNCLKTSSXAQQQHYIVKRIRRFIHHVSKVQVXLMLKKLSKLNIMLLETMAKLKLISNEREINLISQLQFINLXKVSKNCIIKLMXQQNKXIKVNLPLNHKPCXILIGRKXFFVIKKHKFDLLLMLVNLVRNXKNRWQMVISXKVLYVLKKPRIVIRSXXVFLLXDLMVILRTYKHLKHRFIRRFLKVVSTINQMIQLIKTNWSTMNQLLLKATTILPCXHNQRLGAMLIMSKMVGSXNXHRRVQKELFXELLRIRLRIKQFIFWKEMQRIIHILPFLQIKMEIGTKSLPRQLSXEMLRIFLLKFXIKMEMLFGKVRFYHLIVKISIIIQSKVMVIIVWMLFSGVVXIRMAKLXQMVFILIAYVTHQXQKEQIVRSQTLKFKXVLSHQIFLHELSLMKLIEHXAXPCLRKVVMFLHIVYNXFYLMLXKMKNMGMRLLTIISIXIKKVKXHFLKRLRXERVRLRXTLRPXHLLWKIKLVILQRXNCLTSXIRQXYQRKKTLXXFLTVSNILITXRKNLCLFLKKEKXXTRIXKKXHXLSLKLQLLLNHCLKKXLNQEMRKSSLLQTIIVAEXLRSYHLNITGILLTI

SEQ ID NO: 446 - protein, 1165 aa, Streptococcus agalactiae; identical to SEQ ID NO: 445
  VARIANT 427, 437, 464, 478, 483, 490, 498, 515, 525, 557, 558, 572,574, 580, 588, 612, 653, 665, 670, 683, 690, 712, 722, 738,739, 744, 799, 817, 819, 829, 874, 885, 926, 933, 947, 962,982, 984, 1000, 1006, 1022, 1028, 1036, 1043, 1048: Xaa = Any Amino Acid
  VARIANT 1062, 1068, 1072, 1080, 1081, 1092, 1105, 1106, 1110, 1113,1115, 1131, 1150: Xaa = Any Amino Acid

SEQ ID NO: 447 - protein, 1165 aa, Streptococcus agalactiae; identical to SEQ ID NO: 445
  VARIANT 427, 437, 464, 478, 483, 490, 498, 515, 525, 557, 558, 572,574, 580, 588, 612, 653, 665, 670, 683, 690, 712, 722, 738,739, 744, 799, 817, 819, 829, 874, 885, 926, 933, 947, 962,982, 984, 1000, 1006, 1022, 1028, 1036, 1043, 1048: Xaa = Any Amino Acid
  VARIANT 1062, 1068, 1072, 1080, 1081, 1092, 1105, 1106, 1110, 1113,1115, 1131, 1150: Xaa = Any Amino Acid

SEQ ID NO: 448 - protein, 1166 aa, Streptococcus agalactiae
EEQELKNQEQSPVIANVAQQPSPSVTTNTVEKTSVTAASASNTAKEMGDTSVKNDKTEDELLEELSKNLDTSNLGADLEEEYPSKPETTNNKESNVVTNASTAIAQKVPSAYEEVKPESKSSLAVLDTSKITKLQAITQRGKGNVVAIIDTGFDINHDIFRLDSPKDDKHSFKTKTEFEELKAKHNITYGKWVNDKIVFAHNYANNTETVADIAAAMKDGYGSEAKNISHGTHVAGIFVGNSKRPAINGLLLEGAAPNAQVLLMRIPDKIDSDKFGEAYAKAITDAVNLGAKTINMSIGKTADSLIALNDKVKLALKLASEKGVAVVVAAGNEGAFGMDYSKPLSTNPDYGTVNSPAISEDTLSVASYESLKTISEVVETTIEGKLVKLPIVTSKPFDKGKAYDVVYANYGAKKDFEGKDFKGKIALIERGGGLDFMTKITHATNAGVVGIVIFNDQEKRGNFLIPYRELPVGIISKVDGERIKNTSSQLTFNQSFEVVDSQGGNRMLEQSSWGVTAEGAIKPDVTASGFEIYSSTYNNQYQTMSGTSMASPHVAGLMTMLQSHLAEKYKGMNLDSKKLLELSKNILMSSATALYSEEDKAFYSPRQQGAGVVDAEKAIQAQYYITGNDGKAKINLKRMGDKFDITVTIHKLVEGVKELYYQANVATEQVNKGKFALKPQALLDTNWQKVILRDKETQVRFTIDASQFSQKLKEQMANGYFLEGFVRFKEAKDSNQELMSIPFVGFNGDFANLQALETPIYKTLSKGSFYYKPNDTTHKDQLEYNESAPFESNNYTALLTQSASWGYVDYVKNGGELELAPESPKRIILGTFENKVEDKTIHLLERDAANNPYFAISPNKDGNRDEITPQATFLRNVKDISAQVLDQNGNVIWQSKVLPSYRKNFHNNPKQSDGHYRMDALQWSGLDKDGKVVADGFYTYRLRYTPVAEGANSQESDFKVQVSTKSPNLPSRAQFDETNRTLSLAMPKESSYVPTYRLQLVLSHVVKDEEYGDETSYHYFHIDQEGKVTLPKTVKIGESEVAVDPKALTLVVEDKAGNFATVKLSDLLNKAVVSEKENAIVISNSFKYFDNLKKEPMFISKKEKVVNKNLEEIILVKPQTTVTTQSLSKEITKSGNEKVLTSTNNNSSRVAKIISPKHNGDSVNHT

SEQ ID NO: 449 - protein, 1166 aa, Streptococcus agalactiae
EEQELKNQEQSPVIANVAQQPSPSVTTNIVEKTSVTAASASNTVKEMGDTSVKNDKTEDELLEELSKNLDTSNLGADLEEEYPSKPETTNNKESNVVTNASTAIAQKVPSAYEEVKPESKSSLAVFDTSKITKLQAITQRGKGNVVAIIDTGFDINHDIFRLDSPKDDKHSFKTKAEFEELKAKHNITYGKWVNDKIVFAHNYANNTETVADIAAAMKDGYGSEAKNISHGTHVAGIFVGNSKRPAINGLLLEGAAPNAQVLLMRIPDKIDSDKFGEAYAKAITDAVNLGAKTINMSLGKTADSLIALNDKVKLALKLASEKGVAVVVAAGNEGAFGMDYSKPLSTNPDYGTVNSPAISEDTLSVASYESLKTISEVVETTIEGKLVKLPIVTSKPFDKGKAYDVVYANYGAKKDFEGKDFKGKIALIERGGGLDFMTKITHATNAGVVGIVIFNDQEKRGNFLIPYRELPVGVISKVDGERIKNTSSQLTFNQSFEVVDSQGGNRMLEQSSWGVTAEGAIKPDVTASGFEIYSSTYNNQYQTMSGTSMASPHVAGLMTMLQSHLAEKYKGMNLDSKKLLELSKNILMSSATALYSEEDKAFYSPRQQGAGVVDAEKAIQAQYYVTGNDGKAKINLKRVGDKFDITVTIHKLVEGVKELYYQANVATEQVNKGKFALKPQALLDTNWQKVILRDKETQVRFTIDASQFSQKLKEQMANGYFLEGFVRFKEAKDSNQELMSIPFVGFNGDFANLQALETPIYKTLSKGSFYYKPNDTTHKDQLEYNESAPFESNNYTALLTQSASWGYVDYVKNGGELELAPESPKRIILGTFENKVEDKTIHLLERDAANNPYFAISPNKDGNRDEITPQATFLRNVKDISAQVLDQNGNVIWQSKVLPSYRKNFHNNPKQSDGHYRMDAFQWSGLDKDGKVVADGFYTYRLRYTPVAEGANSQESDFKVQVSTKSPNLPLLAQFDETNRTLSLAMPKESSYVPTYRLQLVLSHVVKDEEYGDETSYHYFHIDQEGKVTLPKTVKIGESEVAVDPKALTLVVEDKAGNFATVKLSDLLNKAVVSEKENAIVISNSFKYFDNLKKESMFISKEGKVVNKNLEEITLVKPQTTVTTQSLSKEITKSGNEKVLTSTNNNSSRVAKIISPKHNGDSVNHT

SEQ ID NO: 450 - protein, 1166 aa, Streptococcus agalactiae
EEQELKNQEQSPVIANVAQQPSPSVTTNIVEKTSVTAASASNTAKEMGDTSVKNDKTEDELLEELSKNLDTSNLGADLEEEYPSKPETTNNKESNVVTNASTAIAQKVPSAYEEVKPESKSSLAVFDTSKITKLQAITQRGKGNVVAIIDTGFDINHDIFRLDSPKDDKHSFKTKAEFEELKAKHNITYGKWVNDKIVFAHNYANNTETVADIAAAMKDGYGSEAKNISHGTHVAGIFVGNSKRPAINGLLLEGAAPNAQVLLMRIPDKIDSDKFGEAYAKAITDAVNLGAKTINMSLGKTADSLIALNDKVKLALKLASEKGVAVVVAAGNEGAFGMDYSKPLSTNPDYGTVNSPAISEDTLSVASYESLKTISEVVETTIEGKLVKLPIVTSKPFDKGKAYDVVYANYGAKKDFEGKDFKGKIALIERGGGLDFMTKITHATNAGVVGIVIFNDQEKRGNFLIPYRELPVGVISKVDGERIKNTSSQLTFNQSFEVVDSQGGNRMLEQSSWGVTAEGAIKPDVTASGFEIYSSTYNNQYQTMSGTSMASPHVAGLMTMLQNHLAEKYKGMNLDSKKLLELSKNILMSSATALYSEEDKAFYSPRQQGAGVVDAEKAIQAQYYVTGNDGKAKINLKRVGDKFDITVTIHKLVEGVKELYYQANVATEQVNKGKFALKPQALLDTNWQKVILRDKETQVRFTIDASQFSQKLKEQMANGYFLEGFVRFKEAKDSNQELMSIPFVGFNGDFANLQALETPIYKTLSKGSFYYKPNDTTHKDQLEYNESAPFESNNYTALLTQSASWGYVDYVKNGGELELAPESPKRIILGTFENKVEDKTIHLLERDAANNPYFAISPNKDGNRDEITPQATFLRNVKDISAQVLDQNGNVIWQSKVLPSYRKNFHNNPKQSDGHYRMDAFQWSGLDKDGKVVADGFYTYRLRYTPVAEGANSQESDFKVQVSTKSPNLPLLAQFDETNRTLSLAMPKESSYVPTYRLQLVLSHVVKDEEYGDETSYHYFHIDQEGKVTLPKTVKIGESEVAVDPKALTLVVEDKAGNFATVKLSDLLNKAVVSEKENAIVISNSFKYFDNLKKESMFISKEGKVVNKNLEEITLVKPQTTVTTQSLSKEITKSGNEKVLTSTNNNSSRVAKIISPKHNGDSVNHT

SEQ ID NO: 451 - protein, 1166 aa, Streptococcus agalactiae
EEQELKNQEQSPVIANVAQQPSPSVTTNIVEKTSVTAASASNTAKEMGDTSVKNDKTEDELLEELSKNLDTSNMGADLEEEYPSKPETTNNKESNVVTNASTAIAQKVPSAYEEVKPKSKSSLAVLDTSKITKLQAITQRGKGNVVAIIDTGFDINHDIFRLDSPKDDKHSFKNKAEFEELKAKHNITYGKWVNDKIVFAHNYANNTETVADIAAAMKDGYGSEAKNISHGTHVAGIFVGNSKRPAINGLLLEGAAPNAQVLLMRIPDKIDSDKFGEAYAKAITDAVNLGAKTINMSIGKTADSLIALNDKVKLALKLASEKGVAVVVAAGNEGAFGMDYSKPLSTNPDYGTVNSPAISEDTLSVASYESLKTISEVVETTIEGKLVKLPIVTSKPFDKGKAYDVVYANYGAKKDFEGKDFKGKIALIERGGGLDFMTKITHATNAGVVGIVIFNDQEKRGNFLIPYRELPVGVISKVDGERIKNTSSQLTFNQRFEVVDSQGGNRMLEQSSWGVTAEGAIKPDVTASGFEIYSSTYNNQYQTMSGTSMASPHVAGLMTMLQSHLAEKYKGMNLDSKKLLELSKNILMSSATALYSEEDKAFYSPRQQGAGVVDAEKAIQAQYYVTGNDGKAKINLKRVGDKFDITVTIHKLVEGVKELYYQANVATEQVNKGKFALKPQALLDTNWQKVILRDKETQVRFTIDASQFSQKLKEQMANGYFLEGFVRFKEAKDSNQELMSIPFVGFNGDFASLQALETPIYKTLSKGSFYYKPNDTTHKDQLEYNESAPFESNNYTALLTQSASWGYVDYVKNGGELELAPESPKRIILGTFENKVEDKTIHLLERDAANNPYFAISPNKDGNRDEITPQATFLRNVKDISAQVLDQNGNVIWQSKVLPSYRKNFHNNPKQSDGHYRMDALQWSGLDKDGKVVADGFYTYRLRYTPVAEGANSQESDFKVQVSTKSPNLPSRAQFDETNRTLSLAMPKGSSYVPIYRLQLVLSHVVKDEEYGDETSYYYFHIDQEGKATLPKTVKIGESEVAVDPKALTLVVEDKAGNFATVKLSDLLNKAVVSEKENAIVISNSFKYFDNLKKEPMFISKKEKVVNKNLEEIILVKPHTTVTTQSLSKEITKSGNEKVLTSTNNNSSRVAKIISPKHNGDSVNHT

SEQ ID NO: 452 - DNA, 924 bp, Streptococcus agalactiae
atgaaaaagattagaaaaagtttaggacttctactatgttgctttttaggattggtacaattagcgtttttttcggtagccagtgtaaatgctgatacccctaatcaactaacaatcacacagataggacttcagccaaatactacagaggaggggatttcttatcgtttatggactgtgactgacaacttaaaagttgatttattgagccaaatgacagatagcgaattgaaccagaagtataagagtatcttgacttctcctactgatactaatggtcagacaaagatagcactcccaaatggttcgtactttggtcgtgcttataaagctgatcaaagcgtttcaacaatagtacctttttatattgaattaccagatgataagttatcaaatcaattacagataaatcctaagcgaaaagttgaaacaggccgattaaaacttattaaatatacaaaagaaggaaagataaagaaaaggctatccggagtaatatttgtattatacgataaccagaatcagccagttcgctttaaaaatggacgatttacgaccgatcaagatgggattacttcattagtaactgatgataagggagaaattgaggttgaaggtttattacctggtaagtatatttttcgagaagcaaaagcactaactggttaccgtatatctatgaaggatgctgtagttgctgtagttgctaataaaacacaggaagtagaggtagaaaacgaaaaagaaactcctccaccaacaaatcctaaaccatcacaaccgctttttccacaatcatttcttcctaaaacaggaatgattattggtggaggactgacaattcttggttgtattattttgggaattttgtttatctttttaagaaaaactaaaaatagcaaatctgaaagaaacgatacagta

SEQ ID NO: 453 - DNA, 690 bp, Streptococcus agalactiae
gatacccctaatcaactaacaatcacacagataggacttcagccaaatactacagaggaggggatttcttatcgtttatggactgtgactgacaacttaaaagttgatttattgagccaaatgacagatagcgaattgaaccagaagtataagagtatcttgacttctcctactgatactaatggtcagacaaagatagcactcccaaatggttcgtactttggtcgtgcttataaagctgatcaaagcgtttcaacaatagtacctttttatattgaattaccagatgataagttatcaaatcaattacagataaatcctaagcgaaaagttgaaacaggccgattaaaacttattaaatatacaaaagaaggaaagataaagaaaaggctatcaggagtaatatttgtattatacgataaccagaatcagccagttcgctttaaaaatggacgatttacgaccgatcaagatgggattacttcattagtaactgatgataagggagaaattgaggttgaaggtttattacctggtaagtatatttttcgagaagcaaaagcactaactggttaccgtatatctatgaaggatgctgtagttgctgtagttgctaataaaacacaggaagtagaggtagaaaacgaaaaagaaactcctccaccaacaaatcctaaaccatcacaaccg

SEQ ID NO: 454 - DNA, 691 bp, Streptococcus agalactiae
gatacccctaatcaactaacaatcacacagataggacttcagccaaatactacagaggaggggatttcttatcgtttatggactgtgactgacaacttaaaagttgatttattgagccaaatgacagatagcgaattgaaccagaagtataagagtatcttgacttctcctactgatactaatggtcagacaaagatagcactcccaaatggttcgtactttggtcgtgcttataaagctgatcaaagcgtttcaacaatagtacctttttatattgaattaccagatgataagttatcaaatcaattacagataaatcctaagcgaaaagttgaaacaggccgattaaaacttattaaatatacaaaagaaggaaagataaagaaaaggctwtccggagtaatatttgtattatacgataaccagaatcagccagttcgctttaaaaatggacgatttacgaccgatcaagatgggattacttcattagtaactgatgataagggagaaattgaggttgaaggtttattacctggtaagtatatttttcgagaagcaaaagcactaactggttaccgtatatctatgaaggatgctgtagttgctgtagttgctaataaaacacaggaagtagaggtagaaaacgaaaaagaaactcctccaccaacaaatcctaaaccatcacaaccgc

SEQ ID NO: 455 - DNA, 689 bp, Streptococcus agalactiae
gatacccctaatcaactaacaatcacacagataggacttcagccaaatactacagaggaggggatttcttatcgtttatggactgtgactgacaacttaaaagttgatttattgagccaaatgacagatagcgaattgaaccagaagtataagagtatcttgacttctcctactgatactaatggtcagacaaagatagcactcccaaatggttcgtactttggtcgtgcttataaagctgatcaaagcgtttcaacaatagtacctttttatattgaattaccagatgataagttatcaaatcaattacagataaatcctaagcgaaaagttgaaacaggccgattaaaacttattaaatatacaaaagaaggaaagataaagaaaaggctatccggagtaatatttgtattatacgataaccagaatcagccagttcgctttaaaaatggacgatttacgaccgatcaagatgggattacttcattagtaactgatgataagggagaaattgaggttgaaggtttattacctggtaagtatatttttcgagaagcaaaagcactaactggttaccgtatatctatgaaggatgctgtagttgctgtagttgctaataaaacacaggaagtagaggtagaaaacgaaaaagaaactcctccaccaacaaatcctaaaccatcacaacc

SEQ ID NO: 456 - DNA, 689 bp, Streptococcus agalactiae
gatacccctaatcaactaacaatcacacagataggacttcagccaaatactacagaggaggggatttcttatcgtttatggactgtgactgacaacttaaaagttgatttattgagccaaatgacagatagcgaattgaaccagaagtataagagtatcttgacttctcctactgatactaatggtcagacaaagatagcactcccaaatggttcgtactttggtcgtgcttataaagctgatcaaagcgtttcaacaatagtacctttttatattgaattaccagatgataagttatcaaatcaattacagataaatcctaagcgaaaagttgaaacaggccgattaaaacttattaaatatacaaaagaaggaaagataaagaaaaggctatcaggagtaatatttgtattatacgataaccagaatcagccagttcgctttaaaaatggacgatttacgaccgatcaagatgggattacttcattagtaactgatgataagggagaaattgaggttgaaggtttattacctggtaagtatatttttcgagaagcaaaagcactaactggttaccgtatatctatgaaggatgctgtagttgctgtagttgctaataaaacacaggaagtagaggtagaaaacgaaaaagaaactcctccaccaacaaatcctaaaccatcacaacc

SEQ ID NO: 457 - DNA, 689 bp, Streptococcus agalactiae; identical to SEQ ID NO: 456

SEQ ID NO: 458 - protein, 308 aa, Streptococcus agalactiae
MKKIRKSLGLLLCCFLGLVQLAFFSVASVNADTPNQLTITQIGLQPNTTEEGISYRLWTVTDNLKVDLLSQMTDSELNQKYKSILTSPTDTNGQTKIALPNGSYFGRAYKADQSVSTIVPFYIELPDDKLSNQLQINPKRKVETGRLKLIKYTKEGKIKKRLSGVIFVLYDNQNQPVRFKNGRFTTDQDGITSLVTDDKGEIEVEGLLPGKYIFREAKALTGYRISMKDAVVAVVANKTQEVEVENEKETPPPTNPKPSQPLFPQSFLPKTGMIIGGGLTILGCIILGILFIFLRKTKNSKSERNDTV

SEQ ID NO: 459 - protein, 230 aa, Streptococcus agalactiae
DTPNQLTITQIGLQPNTTEEGISYRLWTVTDNLKVDLLSQMTDSELNQKYKSILTSPTDTNGQTKIALPNGSYFGRAYKADQSVSTIVPFYIELPDDKLSNQLQINPKRKVETGRLKLIKYTKEGKIKKRLSGVIFVLYDNQNQPVRFKNGRFTTDQDGITSLVTDDKGEIEVEGLLPGKYIFREAKALTGYRISMKDAVVAVVANKTQEVEVENEKETPPPTNPKPSQP

SEQ ID NO: 460 - protein, 230 aa, Streptococcus agalactiae; identical to SEQ ID NO: 459

SEQ ID NO: 461 - protein, 229 aa, Streptococcus agalactiae
DTPNQLTITQIGLQPNTTEEGISYRLWTVTDNLKVDLLSQMTDSELNQKYKSILTSPTDTNGQTKIALPNGSYFGRAYKADQSVSTIVPFYIELPDDKLSNQLQINPKRKVETGRLKLIKYTKEGKIKKRLSGVIFVLYDNQNQPVRFKNGRFTTDQDGITSLVTDDKGEIEVEGLLPGKYIFREAKALTGYRISMKDAVVAVVANKTQEVEVENEKETPPPTNPKPSQ

SEQ ID NO: 462 - protein, 229 aa, Streptococcus agalactiae; identical to SEQ ID NO: 461

SEQ ID NO: 463 - DNA, 1228 bp, Streptococcus agalactiae
tgacaaatattattttacccaacgtggtttagagcaagcaggtgtaactatattacctttctcaccgaataatatcagtgaggatttagagattattgcaggaaatgcttttcgtccagataacaatgaagagttggcttatgttattgaaaagggctatcattttaaacgatatcatgaatttctcggagattttatgcgtcagttcactagtctaggtgtagctggggcacatggaaaaacctcaacgacaggtttattagctcatgttttaaaaaatattacagacacttctttcctaattggagatggtacaggacgtggttctgctaatgctaattactttgtgtttgaagctgatgaatacgaacgtcattttatgccgtaccatccagaatactcaattattaccaatattgattttgaccatcctgattattttacaggcctagaggacgtattcaatgcctttaatgactatgctaagcaagttcaaaaaggtttattcatttatggagaagatccaaaacttcatgaaatcacttctgaggcaccaatatattattatggttttgaagattcaaatgattttatagcaaaagacatcactcgaactgttaatggttctgactttaaggttttctataaccaagaagaaattggtcagtttcatgtaccagcatacggtaaacataatatcttaaatgcaactgctgttattgctaacctttacataatgggaattgatatggcattagtagctgagcatttgaagacattttcaggggtaaagcgtcgttttactgagaagattattgacgatactgtcattattgatgactttgctcaccatcctactgagattattgcgacattagatgctgctcgacaaaaatacccgtcaaaagaaattgtagctattttccaaccgcatacgttcactcgtacgatagctcttttagacgaatttgcccatgccttgagtcaagcggatagcgtttatctcgctcaaatatatggttctgctagagaagtagataatggtgaggtgaaggtagaagatttagctgctaagattgtcaaacactcagatttagtgacagtcgaaaatgtctcgcctttactcaatcatgataatgctgtctatgtctttatgggtgctggagacattcaattgtatgagcgctcttttgaagaattattagctaacctaactaaaaatacacaa

SEQ ID NO: 464 - DNA, 1249 bp, Streptococcus agalactiae
aaaagcaggctctagtgacgttgacaaatattattttacccaacgtggtttagagcaagcaggtgtaactatattacctttctcaccgaataatatcagtgaggatttagagattattgcaggaaatgcttttcgtccagataacaatgaagagttggcttatgttattgaaaagggctatcattttaaacgatatcatgaatttctcggagattttatgcgtcagttcactagtctaggtgtagctggggcacatggaaaaacctcaacgacaggtttattagctcatgttttaaaaaatattacagacacttctttcctaattggagatggtacaggacgtggttctgctaatgctaattactttgtgtttgaagctgatgaatacgaacgtcattttatgccgtaccatccagaatactcaattattaccaatattgattttgaccatcctgattattttacaggcctagaggacgtattcaatgcctttaatgactatgctaagcaagttcaaaaaggtttattcatttatggagaagatccaaaacttcatgaaatcacttctgaggcaccaatatattattatggttttgaagattcaaatgattttatagcaaaagacatcactcgaactgttaatggttctgactttaaggttttctataaccaagaagaaattggtcagtttcatgtaccagcatacggtaaacataatatcttaaatgcaactgctgttattgctaacctttacataatgggaattgatatggcattagtagctgagcatttgaagacattttcaggggtaaagcgtcgttttactgagaagattattgacgatactgtcattattgatgactttgctcaccatcctactgagattattgcgacattagatgctgctcgacaaaaatacccgtcaaaagaaattgtagctattttccaaccgcatacgttcactcgtacgatagctcttttagacgaatttgcccatgccttgagtcaagcggatagcgtttatctcgctcaaatatatggttctgctagagaagtagataatggtgaggtgaaggtagaagatttagctgctaagattgtcaaacactcagatttagtgacagtcgaaaatgtctcgcctttactcaatcatgataatgctgtctatgtctttatgggtgctggagacattcaattgtatgagcgctcttttgaagaattattagctaacctaactaaaaatacacaa

SEQ ID NO: 465 - DNA, 1248 bp, Streptococcus agalactiae
aaagcaggctctagtgacgttgacaaatattattttacccaacgtggtttagagcaagcaggtgtaactatattacctttctcaccgaataatatcagtgaggatttagagattattgcaggaaatgcttttcgtccagataacaatgaagagttggcttatgttattgaaaagggctatcattttaaacgatatcatgaatttctcggagattttatgcgtcagttcactagtctaggtgtagctggggcacatggaaaaacctcaacgacaggtttattagctcatgttttaaaaaatattacagacacttctttcctaattggagatggtacaggacgtggttctgctaatgctaattactttgtgtttgaagctgatgaatacgaacgtcattttatgccgtaccatccagaatactcaattattaccaatattgattttgaccatcctgattattttacaggcctagaggacgtattcaatgcttttaatgactatgctaagcaagttcaaaaaggtttattcatttatggagaagattcaaaacttcatgaaatcacttctaaggcaccaatatattattatggttttgaagattcaaatgattttatagcaaaagacatcactcgaactgttaatggttctgactttaaggttttctataaccaagaagaaattggtcagtttcatgtaccagcatacggtaaacataatatcttaaatgcaactgctgttattgctaacctttacataatgggaattgatatggcattagtagctgagcatttgaagacattttcaggggtaaaacgtcgttttactgagaagattattgacgatactgtcattattgatgactttgctcaccatcctactgagattattgcgacattagatgctgctcgacaaaaatacccgtcaaaagaaattgtagctattttccaaccgcatacgttcactcgtacgatagctcttttagacgattttgcccatgctttgagtcaagcggatagcgtttatcttgctcaaatatatggttctgctagagaagtagataatggtgaggtgaaggtagaagatttagctgctaagattgtcaaacactcagatttagtgacagtcgaaaatgtctcgcctttactcaatcatgataatgctgtctatgtctttatgggtgctggagacattcaattgtatgagcgctcttttgaagaattattagctaacctaactaaaaatacacaa

SEQ ID NO: 466 - DNA, 1249 bp, Streptococcus agalactiae
aaaagcaggctctagtgacgttgacaaatattattttactcaacgtggtttagagcaagcaggtataactatattacctttctcaccgaataatatcagtgaggatttagagattattgcaggaaatgcttttcgtccagataacaatgaagagttggcttatgttattgaaaagggctatcattttaaacgatatcatgaatttctcggagattttatgcgtcagttcactagtctaggtgtagctggggcacatggaaaaacctcaacgacaggtttattagctcatgttttaaaaaatattacagacacttctttcctaattggagatggtacaggacgtggttctgctaatgctaattactttgtgtttgaagctgatgaatacgaacgtcattttatgccgtaccatccagaatactcaattattaccaatattgattttgaccatcctgattattttacaggcctagaggacgtattcaatgcttttaatgactatgctaagcaagttcaaaaaggtttattcatttatggagaagatccaaaacttcatgaaatcacttctgaggcaccaatatattattatggttttgaagattcaaatgattttatagcaaaagatatcactcgaactgttaatggttctgactttaaggttttctataaccaagaagaaattggtcagtttcacgtaccagcatacggtaaacataatatcttaaatgcaactgctgttattgctaacctttacataatgggaattgatatggcattagtagctgagcatttgaagacattttcaggggtaaaacgtcgttttactgagaaaattattgacgatactgtcattattgatgactttgctcaccatcctactgagattattgcgacattagatgctgctcgacaaaaatacccgtcaaaagaaattgtagctattttccaaccgcatacgttcactcgtacgatagctcttttagacgaatttgcccatgccttgagtcaagcggatagcgtttatctcgctcaaatatatggttctgctagagaagtagataatggtgaggtgaaggtagaagatttagctgctaagattgtcaaacactcagatttagtgacagtcgaaaatgtctcgcctttactcaatcatgataatgctgtctatgtctttatgggtgctggagacattcaattgtatgagcgctcttttgaagaattattagctaacctaactaaaaatacacaa

SEQ ID NO: 467 - DNA, 1248 bp, Streptococcus agalactiae
aaagcaggctctagtgacgttgacaaatattattttacccaacgtggtttagagcaagcaggtgtaactatattacctttctcaccgaataatatcagtgaggatttagagattattgcaggaaatgcttttcgtccagataacaatgaagagttggcttatgttattgaaaagggctatcattttaaacgatatcatgaatttctcggagattttatgcgtcagttcactagtctaggtgtagctggggcacatggaaaaacctcaacgacaggtttattagctcatgttttaaaaaatattacagacacttctttcctaattggagatggtacaggacgtggttctgctaatgctaattactttgtgtttgaagctgatgaatacgaacgtcattttatgccgtaccatccagaatactcaattattaccaatattgattttgaccatcctgattattttacaggcttagaggacgtattcaatgcctttaatgactatgctaagcaagttcaaaaaggtttattcatttatggagaagatccaaaacttcatgaaatcacttctgaggcaccaatatattattatggttttgaagattcaaatgattttatagcaaaagacatcactcgaactgttaatggttctgactttaaggttttctataaccaagaagaaattggtcagtttcatgtaccagcatacggtaaacataatatcttaaatgcaactgctgttattgctaacctttacataatgggaattgatatggcattagtagctgagcatttgaagacgttttcaggggtaaagcgtcgttttactgagaagattattgacgatactgtcattattgatgactttgctcaccatcctactgagattattgcgacattagatgctgctcgacaaaaatacccgtcaaaagaaattgtagctattttccaaccgcatacgttcactcgtacgatagctcttttagacgaatttgcccatgccttgagtcaagcggatagcgtttatctcgctcaaatatatggttctgctagagaagtagataatggtgaggtgaaggtagaagatttagctgctaagattgtcaaacactcagatttagtgacagtcgaaaatgtctcgcctttactcaatcatgataatgctgtctatgtctttatgggtgctggagacattcaattgtatgagcgctcttttgaagaattattagctaacctaactaaaaatacacaa

SEQ ID NO: 468 - DNA, 1249 bp, Streptococcus agalactiae; identical to SEQ ID NO: 464

SEQ ID NO: 469 - DNA, 1248 bp, Streptococcus agalactiae
aaagcaggctctagtgacgttgacaaatattattttacccaacgtggtttagagcaagcaggtgtaactatattacctttctcaccgaataatatcagtgaggatttagagattattgcaggaaatgcttttcgtccagataacaatgaagagttggcttatgttattgaaaagggctatcattttaaacgatatcatgaatttctcggagattttatgcgtcagttcactagtctaggtgtagctggggcacatggaaaaacctcaacgacaggtttattagctcatgttttaaaaaatattacagacacttctttcctaattggagatggtacaggacgtggttctgctaatgctaattactttgtgtttgaagctgatgaatacgaacgtcattttatgccgtaccatccagaatactcaattattaccaatattgattttgaccatcctgattattttacaggcctagaggacgtattcaatgcctttaatgactatgctaagcaagttcaaaaaggtttattcatttatggagaagatccaaaacttcatgaaatcacttctgaggcaccaatatattattatggttttgaagattcaaatgattttatagcaaaagacatcactcgaactgttaatggttctgactttaaggttttctataaccaagaagaaattggtcagtttcatgtaccagcatacggtaaacataatatcttaaatgcaactgctgttattgctaacctttacataatgggaattgatatggcattagtagctgagcatttgaagacattttcaggggtaaagcgtcgttttactgagaagattattgacgatactgtcattattgatgactttgctcaccatcctactgagattattgcgacattagatgctgctcgacaaaaatacccgtcaaaagaaattgtagctattttccaaccgcatacgttcactcgtacgatagctcttttagacgaatttgcccatgccttgagtcaagcggatagcgtttatctcgctcaaatatatggttctgctagagaagtagataatggtgaggtgaaggtagaagatttagctgctaagattgtcaaacactcagatttagtgacagtcgaaaatgtctcgcctttactcaatcatgataatgctgtctatgtctttatgggtgctggagacattcaattgtatgagcgctcttttgaagaattattagctaacctaactaaaaatacacaa

SEQ ID NO: 470 - DNA, 1250 bp, Streptococcus agalactiae
aaaaagcaggctctagtgacgttgacaaatattattttacccaacgtggtttagagcaagcaggtgtaactatattacctttctcaccgaataatatcagtgaggatttagagattattgcaggaaatgcttttcgtccagataacaatgaagagttggcttatgttattgaaaagggctatcattttaaacgatatcatgaatttctcggagattttatgcgtcagttcactagtctaggtgtagctggggcacatggaaaaacctcaacgacaggtttattagctcatgttttaaaaaatattacagacacttctttcctaattggagatggtacaggacgtggttctgctaatgctaattactttgtgtttgaagctgatgaatacgaacgtcattttatgccgtaccatccagaatactcaattattaccaatattgattttgaccatcctgattattttacaggcctagaggacgtattcaatgcttttaatgactatgctaagcaagttcaaaaaggtttattcatttatggagaagattcaaaacttcatgaaatcacttctaaggcaccaatatattattatggttttgaagattcaaatgattttatagcaaaagacatcactcgaactgttaatggttctgactttaaggttttctataaccaagaagaaattggtcagtttcatgtaccagcatacggtaaacataatatcttaaatgcaactgctgttattgctaacctttacataatgggaattgatatggcattagtagctgagcatttgaagacattttcaggggtaaaacgtcgttttactgagaagattattgacgatactgtcattattgatgactttgctcaccatcctactgagattattgcgacattagatgctgctcgacaaaaatacccgtcaaaagaaattgtagctattttccaaccgcatacgttcactcgtacgatagctcttttagacgattttgcccatgctttgagtcaagcggatagcgtttatcttgctcaaatatatggttctgctagagaagtagataatggtgaggtgaaggtagaagatttagctgctaagattgtcaaacactcagatttagtgacagtcgaaaatgtctcgcctttactcaatcatgataatgctgtctatgtctttatgggtgctggagacattcaattgtatgagcgctcttttgaagaattattagctaacctaactaaaaatacacaa

SEQ ID NO: 471 - DNA, 1255 bp, Streptococcus agalactiae
gttcaaaaaagcaggctctagtgacgttgacaaatattattttactcaacgtggtttagagcaagcaggtataactatattacctttctcaccgaataatatcagtgaggatttagagattattgcaggaaatgcttttcgtccagataacaatgaagagttggcttatgttattgaaaagggctatcattttaaacgatatcatgaatttctcggagattttatgcgtcagttcactagtctaggtgtagctggggcacatggaaaaacctcaacgacaggtttattagctcatgttttaaaaaatattacagacacttctttcctaattggagatggtacaggacgtggttctgctaatgctaattactttgtgtttgaagctgatgaatacgaacgtcattttatgccgtaccatccagaatactcaattattaccaatattgattttgaccatcctgattattttacaggcctagaggacgtattcaatgcttttaatgactatgctaagcaagttcaaaaaggtttattcatttatggagaagatccaaaacttcatgaaatcacttctgaggcaccaatatattattatggttttgaagattcaaatgattttatagcaaaagatatcactcgaactgttaatggttctgactttaaggttttctataaccaagaagaaattggtcagtttcacgtaccagcatacggtaaacataatatcttaaatgcaactgctgttattgctaacctttacataatgggaattgatatggcattagtagctgagcatttgaagacattttcaggggtaaaacgtcgttttactgagaaaattattgacgatactgtcattattgatgactttgctcaccatcctactgagattattgcgacattagatgctgctcgacaaaaatacccgtcaaaagaaattgtagctattttccaaccgcatacgttcactcgtacgatagctcttttagacgaatttgcccatgccttgagtcaagcggatagcgtttatctcgctcaaatatatggttctgctagagaagtagataatggtgaggtgaaggtagaagatttagctgctaagattgtcaaacactcagatttagtgacagtcgaaaatgtctcgcctttactcaatcatgataatgctgtctatgtctttatgggtgctggagacattcaattgtatgagcgctcttttgaagaattattagctaacctaactaaaaatacacaa

SEQ ID NO: 472 - DNA, 1242 bp, Streptococcus agalactiae
caggctctagtgacgtgacaaatattattttacccaacgtggttagagcaagcaggtgtaactatattacctttctcaccgaataatatcagtgaggatttagagattattgcaggaaatgcttttcgtccagataacaatgaagagttggcttatgttattgaaaagggctatcattttaaacgatatcatgaatttctcggagattttatgcgtcagttcactagtctaggtgtagctggggcacatggaaaaacctcaacgacaggtttattagctcatgttttaaaaaatattacagacacttctttcctaattggagatggtacaggacgtggttctgctaatgctaattactttgtgtttgaagctgatgaatacgaacgtcattttatgccgtaccatccagaatactcaattattaccaatattgattttgaccatcctgattattttacaggcctagaggacgtattcaatgcctttaatgactatgctaagcaagttcaaaaaggtttattcatttatggagaagatccaaaacttcatgaaatcacttctgaggcaccaatatattattatggttttgaagattcaaatgattttatagcaaaagacatcactcgaactgttaatggttctgactttaaggttttctataaccaagaagaaattggtcagtttcatgtaccagcatacggtaaacataatatcttaaatgcaactgctgttattgctaacctttacataatgggaattgatatggcattagtagctgagcatttgaagacattttcaggggtaaagcgtcgttttactgagaagattattgacgatactgtcattattgatgactttgctcaccatcctactgagattattgcgacattagatgctgctcgacaaaaatacccgtcaaaagaaattgtagctattttccaaccgcatacgttcactcgtacgatagctcttttagacgaatttgcccatgccttgagtcaagcggatagcgtttatctcgctcaaatatatggttctgctagagaagtagataatggtgaggtgaaggtagaagatttagctgctaagattgtcaaacactcagatttagtgacagtcgaaaatgtctcgcctttactcaatcatgataatgctgtctatgtctttatgggtgctggagacattcaattgtatgagcgctcttttgaagaattattagctaacctaactaaaaatacacaa

SEQ ID NO: 473 - DNA, 1329 bp, Streptococcus agalactiae
atgtcaaaaacttatcattttattggtattaaaggatccggaatgagtgccctagcactgatgcttcatcaaatgggacataacgtccaaggaagtgacgttgacaaatattattttacccaacgtggtttagagcaagcaggtgtaactatattacctttctcaccgaataatatcagtgaggatttagagattattgcaggaaatgcttttcgtccagataacaatgaagagttggcttatgttattgaaaagggctatcaatttaaacgatatcatgaatttctcggagattttatgcgtcagttcactagtctaggtgtagctggggcacatggaaaaacctcaacgacaggtttattagctcatgttttaaaaaatattacagacacttctttcctaattggagatggtacaggacgtggttctgctaatgctaattactttgtgtttgaagctgatgaatacgaacgtcattttatgccgtaccatccagaatactcaattattaccaatattgattttgaccatcctgattattttacaggcttagaggacgtattcaatgcctttaatgactatgctaagcaagttcaaaaaggtttattcatttatggagaagatccaaaacttcatgaaatcacttctgaggcaccaatatattattatggttttgaagattcaaatgattttatagcaaaagacatcactcgaactgttaatggttctgactttaaggttttctataaccaagaagaaattggtcagtttcatgtaccagcatacggtaaacataatatcttaaatgcaactgctgttattgctaacctttacataatgggaattgatatggcattagtagctgagcatttgaagacgttttcaggggtaaagcgtcgttttactgagaagattattgacgatactgtcattattgatgactttgctcaccatcctactgagattattgcgacattagatgctgctcgacaaaaatacccgtcaaaagaaattgtagctattttccaaccgcatacgttcactcgtacgatagctcttttagacgaatttgcccatgccttgagtcaagcggatagcgtttatctcgctcaaatatatggttctgctagagaagtagataatggtgaggtgaaggtagaagatttagctgctaagattgtcaaacactcagatttagtgacagtcgaaaatgtctcgcctttactcaatcatgataatgctgtctatgtctttatgggtgctggagacattcaattgtatgagcgctcttttgaagaattattagctaacctaactaaaaatacacaa

SEQ ID NO: 474 - DNA, 1244 bp, Streptococcus agalactiae
caggctctagtgacgttgacaaatattattttacccaacgtggtttagagcaagcaggtgtaactatattacctttctcaccgaataatatcagtgaggatttagagattattgcaggaaatgcttttcgtccagataacaatgaagagttggcttatgttattgaaaagggctatcattttaaacgatatcatgaatttctcggagattttatgcgtcagttcactagtctaggtgtagctggggcacatggaaaaacctcaacgacaggtttattagctcatgttttaaaaaatattacagacacttctttcctaattggagatggtacaggacgtggttctgctaatgctaattactttgtgtttgaagctgatgaatacgaacgtcattttatgccgtaccatccagaatactcaattattaccaatattgattttgaccatcctgattattttacaggcctagaggacgtattcaatgcctttaatgactatgctaagcaagttcaaaaaggtttattcatttatggagaagatccaaaacttcatgaaatcacttctgaggcaccaatatattattatggttttgaagattcaaatgattttatagcaaaagacatcactcgaactgttaatggttctgactttaaggttttctataaccaagaagaaattggtcagtttcatgtaccagcatacggtaaacataatatcttaaatgcaactgctgttattgctaacctttacataatgggaattgatatggcattagtagctgagcatttgaagacattttcaggggtaaagcgtcgttttactgagaagattattgacgatactgtcattattgatgactttgctcaccatcctactgagattattgcgacattagatgctgctcgacaaaaatacccgtcaaaagaaattgtagctattttccaaccgcatacgttcactcgtacgatagctcttttagacgaatttgcccatgccttgagtcaagcggatagcgtttatctcgctcaaatatatggttctgctagagaagtagataatggtgaggtgaaggtagaagatttagctgctaagattgtcaaacactcagatttagtgacagtcgaaaatgtctcgcctttactcaatcatgataatgctgtctatgtctttatgggtgctggagacattcaattgtatgagcgctcttttgaagaattattagctaacctaactaaaaatacacaa

SEQ ID NO: 475 - protein, 409 aa, Streptococcus agalactiae
DKYYFTQRGLEQAGVTILPFSPNNISEDLEIIAGNAFRPDNNEELAYVIEKGYHFKRYHEFLGDFMRQFTSLGVAGAHGKTSTTGLLAHVLKNITDTSFLIGDGTGRGSANANYFVFEADEYERHFMPYHPEYSIITNIDFDHPDYFTGLEDVFNAFNDYAKQVQKGLFIYGEDPKLHEITSEAPIYYYGFEDSNDFIAKDITRTVNGSDFKVFYNQEEIGQFHVPAYGKHNILNATAVIANLYIMGIDMALVAEHLKTFSGVKRRFTEKIIDDTVIIDDFAHHPTEIIATLDAARQKYPSKEIVAIFQPHTFTRTIALLDEFAHALSQADSVYLAQIYGSAREVDNGEVKVEDLAAKIVKHSDLVTVENVSPLLNHDNAVYVFMGAGDIQLYERSFEELLANLTKNTQ

SEQ ID NO: 476 - protein, 416 aa, Streptococcus agalactiae
KAGSSDVDKYYFTQRGLEQAGVTILPFSPNNISEDLEIIAGNAFRPDNNEELAYVIEKGYHFKRYHEFLGDFMRQFTSLGVAGAHGKTSTTGLLAHVLKNITDTSFLIGDGTGRGSANANYFVFEADEYERHFMPYHPEYSIITNIDFDHPDYFTGLEDVFNAFNDYAKQVQKGLFIYGEDPKLHEITSEAPIYYYGFEDSNDFIAKDITRTVNGSDFKVFYNQEEIGQFHVPAYGKHNILNATAVIANLYIMGIDMALVAEHLKTFSGVKRRFTEKIIDDTVIIDDFAHHPTEIIATLDAARQKYPSKEIVAIFQPHTFTRTIALLDEFAHALSQADSVYLAQIYGSAREVDNGEVKVEDLAAKIVKHSDLVTVENVSPLLNHDNAVYVFMGAGDIQLYERSFEELLANLTKNTQ

SEQ ID NO: 477 - protein, 416 aa, Streptococcus agalactiae
KAGSSDVDKYYFTQRGLEQAGVTILPFSPNNISEDLEIIAGNAFRPDNNEELAYVIEKGYHFKRYHEFLGDFMRQFTSLGVAGAHGKTSTTGLLAHVLKNITDTSFLIGDGTGRGSANANYFVFEADEYERHFMPYHPEYSIITNIDFDHPDYFTGLEDVFNAFNDYAKQVQKGLFIYGEDSKLHEITSKAPIYYYGFEDSNDFIAKDITRTVNGSDFKVFYNQEEIGQFHVPAYGKHNILNATAVIANLYIMGIDMALVAEHLKTFSGVKRRFTEKIIDDTVIIDDFAHHPTEIIATLDAARQKYPSKEIVAIFQPHTFTRTIALLDDFAHALSQADSVYLAQIYGSAREVDNGEVKVEDLAAKIVKHSDLVTVENVSPLLNHDNAVYVFMGAGDIQLYERSFEELLANLTKNTQ

SEQ ID NO: 478 - protein, 416 aa, Streptococcus agalactiae
KAGSSDVDKYYFTQRGLEQAGITILPFSPNNISEDLEIIAGNAFRPDNNEELAYVIEKGYHFKRYHEFLGDFMRQFTSLGVAGAHGKTSTTGLLAHVLKNITDTSFLIGDGTGRGSANANYFVFEADEYERHFMPYHPEYSIITNIDFDHPDYFTGLEDVFNAFNDYAKQVQKGLFIYGEDPKLHEITSEAPIYYYGFEDSNDFIAKDITRTVNGSDFKVFYNQEEIGQFHVPAYGKHNILNATAVIANLYIMGIDMALVAEHLKTFSGVKRRFTEKIIDDTVIIDDFAHHPTEIIATLDAARQKYPSKEIVAIFQPHTFTRTIALLDEFAHALSQADSVYLAQIYGSAREVDNGEVKVEDLAAKIVKHSDLVTVENVSPLLNHDNAVYVFMGAGDIQLYERSFEELLANLTKNTQ

SEQ ID NO: 479 - protein, 416 aa, Streptococcus agalactiae; identical to SEQ ID NO: 476

SEQ ID NO: 480 - protein, 416 aa, Streptococcus agalactiae; identical to SEQ ID NO: 476

SEQ ID NO: 481 - protein, 418 aa, Streptococcus agalactiae
FKKAGSSDVDKYYFTQRGLEQAGITILPFSPNNISEDLEIIAGNAFRPDNNEELAYVIEKGYHFKRYHEFLGDFMRQFTSLGVAGAHGKTSTTGLLAHVLKNITDTSFLIGDGTGRGSANANYFVFEADEYERHFMPYHPEYSIITNIDFDHPDYFTGLEDVFNAFNDYAKQVQKGLFIYGEDPKLHEITSEAPIYYYGFEDSNDFIAKDITRTVNGSDFKVFYNQEEIGQFHVPAYGKHNILNATAVIANLYIMGIDMALVAEHLKTFSGVKRRFTEKIIDDTVIIDDFAHHPTEIIATLDAARQKYPSKEIVAIFQPHTFTRTIALLDEFAHALSQADSVYLAQIYGSAREVDNGEVKVEDLAAKIVKHSDLVTVENVSPLLNHDNAVYVFMGAGDIQLYERSFEELLANLTKNTQ

SEQ ID NO: 482 - protein, 416 aa, Streptococcus agalactiae; identical to SEQ ID NO: 476

SEQ ID NO: 483 - protein, 416 aa, Streptococcus agalactiae; identical to SEQ ID NO: 477

SEQ ID NO: 484 - protein, 443 aa, Streptococcus agalactiae
MSKTYHFIGIKGSGMSALALMLHQMGHNVQGSDVDKYYFTQRGLEQAGVTILPFSPNNISEDLEIIAGNAFRPDNNEELAYVIEKGYQFKRYHEFLGDFMRQFTSLGVAGAHGKTSTTGLLAHVLKNITDTSFLIGDGTGRGSANANYFVFEADEYERHFMPYHPEYSIITNIDFDHPDYFTGLEDVFNAFNDYAKQVQKGLFIYGEDPKLHEITSEAPIYYYGFEDSNDFIAKDITRTVNGSDFKVFYNQEEIGQFHVPAYGKHNILNATAVIANLYIMGIDMALVAEHLKTFSGVKRRFTEKIIDDTVIIDDFAHHPTEIIATLDAARQKYPSKEIVAIFQPHTFTRTIALLDEFAHALSQADSVYLAQIYGSAREVDNGEVKVEDLAAKIVKHSDLVTVENVSPLLNHDNAVYVFMGAGDIQLYERSFEELLANLTKNTQ

SEQ ID NO: 485 - protein, 414 aa, Streptococcus agalactiae
GSSDVDKYYFTQRGLEQAGVTILPFSPNNISEDLEIIAGNAFRPDNNEELAYVIEKGYHFKRYHEFLGDFMRQFTSLGVAGAHGKTSTTGLLAHVLKNITDTSFLIGDGTGRGSANANYFVFEADEYERHFMPYHPEYSIITNIDFDHPDYFTGLEDVFNAFNDYAKQVQKGLFIYGEDPKLHEITSEAPIYYYGFEDSNDFIAKDITRTVNGSDFKVFYNQEEIGQFHVPAYGKHNILNATAVIANLYIMGIDMALVAEHLKTFSGVKRRFTEKIIDDTVIIDDFAHHPTEIIATLDAARQKYPSKEIVAIFQPHTFTRTIALLDEFAHALSQADSVYLAQIYGSAREVDNGEVKVEDLAAKIVKHSDLVTVENVSPLLNHDNAVYVFMGAGDIQLYERSFEELLANLTKNTQ

SEQ ID NO: 486 - DNA, 372 bp, Streptococcus agalactiae
tattttttaacaacaaaaaaaggaaaagagctaaggaaaaatgcagaaaaattctatggagaatataaagaaaatccagaagaatatcatcaaatagctaaagataaagcaagtgaatattcaaatttagctgttgatacttttaaagattataaaggtaaatttgaatcaggtgaattgacaacagaggatatcgtctcagccgttaaggaaaaaagcggagaagtagttgactttgctaatgattttgtcaatcaagctaaatcaaaattctcagacgaggatactgctaaaaaagaagataaggctcctgaaacaaaagtagaagatattgtcattgattataaagaaaacacagaagataaagaaaaa

SEQ ID NO: 487 - DNA, 372 bp, Streptococcus agalactiae; identical to SEQ ID NO: 486

SEQ ID NO: 488 - DNA, 372 bp, Streptococcus agalactiae; identical to SEQ ID NO: 486

SEQ ID NO: 489 - DNA, 372 bp, Streptococcus agalactiae; identical to SEQ ID NO: 486

SEQ ID NO: 490 - DNA, 372 bp, Streptococcus agalactiae; identical to SEQ ID NO: 486

SEQ ID NO: 491 - DNA, 372 bp, Streptococcus agalactiae; identical to SEQ ID NO: 486

SEQ ID NO: 492 - DNA, 372 bp, Streptococcus agalactiae; identical to SEQ ID NO: 486

SEQ ID NO: 493 - DNA, 372 bp, Streptococcus agalactiae; identical to SEQ ID NO: 486

SEQ ID NO: 494 - DNA, 372 bp, Streptococcus agalactiae; identical to SEQ ID NO: 486

SEQ ID NO: 495 - DNA, 372 bp, Streptococcus agalactiae
tattttttaacaacaaaaaaaggaaaagagctaaggaaaaatgcagaaaaattctatggagaatataaagaaaatccagaagaatatcatcaaatagctaaagataaagcaagtgaatattcaaatttagctgttgatacttttaaagattataaaggtaaatttgaatcaggtgaattgacaacagaggatatcgtctcagccgttaaggaaaaaagcggagaagtagttgactttgctaatgattttgtcaatcaagctaaatcaaaattctcagatgaggatactgctaaaaaagaaaataaggctcctgaaacaaaagtagaagatattgtcattgattataaagaaaacacagaagataaagaaaaa

SEQ ID NO: 496 - DNA, 372 bp, Streptococcus agalactiae; identical to SEQ ID NO: 486

SEQ ID NO: 497 - protein, 124 aa, Streptococcus agalactiae
YFLTTKKGKELRKNAEKFYGEYKENPEEYHQIAKDKASEYSNLAVDTFKDYKGKFESGELTTEDIVSAVKEKSGEVVDFANDFVNQAKSKFSDEDTAKKEDKAPETKVEDIVIDYKENTEDKEK

SEQ ID NO: 498 - protein, 124 aa, Streptococcus agalactiae; identical to SEQ ID NO: 497

SEQ ID NO: 499 - protein, 124 aa, Streptococcus agalactiae; identical to SEQ ID NO: 497

SEQ ID NO: 500 - protein, 124 aa, Streptococcus agalactiae; identical to SEQ ID NO: 497

SEQ ID NO: 501 - protein, 124 aa, Streptococcus agalactiae; identical to SEQ ID NO: 497

SEQ ID NO: 502 - protein, 124 aa, Streptococcus agalactiae; identical to SEQ ID NO: 497

SEQ ID NO: 503 - protein, 124 aa, Streptococcus agalactiae; identical to SEQ ID NO: 497

SEQ ID NO: 504 - protein, 124 aa, Streptococcus agalactiae; identical to SEQ ID NO: 497

SEQ ID NO: 505 - protein, 124 aa, Streptococcus agalactiae; identical to SEQ ID NO: 497

SEQ ID NO: 506 - protein, 124 aa, Streptococcus agalactiae
YFLTTKKGKELRKNAEKFYGEYKENPEEYHQIAKDKASEYSNLAVDTFKDYKGKFESGELTTEDIVSAVKEKSGEVVDFANDFVNQAKSKFSDEDTAKKENKAPETKVEDIVIDYKENTEDKEK

SEQ ID NO: 507 - protein, 124 aa, Streptococcus agalactiae; identical to SEQ ID NO: 497

SEQ ID NO: 508 - DNA, 1857 bp, Streptococcus agalactiae
aatagtactgagacaagtgcttcagtagttcctactacaaatactatcgttcaaactaatgacagtaatcctaccgcaaaatttgtatcagaatcaggacaatctgtaataggtcaagtaaaaccagataattctgcggcgcttacaacagttgacacgcctcatcatatttcagctccagatgctttaaaaacaactcaatcaagtcctgtcgttgagagtacttctactaagttaactgaagagacttacaaacaaaaagatggtcaagatttagccaacatggtgagaagtggtcaagttactagtgaggaactcgttaatatggcatacgatattattgctaaagaaaacccatctttaaatgcagtcattactactagacgccaagaagctattgaagaggctagaaaacttaaagataccaatcagccgtttttaggtgttcccttgttagtcaaggggttagggcacagtattaaaggtggtgaaaccaataatggcttgatctatgcagatggaaaaattagcacatttgacagtagctatgtcaaaaaatataaagatttaggatttattattttaggacaaacgaactttccagagtatgggtggcgtaatataacagattctaaattatacggtctaacgcataatccttgggatcttgctcataatgctggtggctcttctggtggaagtgcagcagccattgctagcggaatgacgccaattgctagcggtagtgatgctggtggttctatccgtattccatcttcttggacgggcttggtaggtttaaaaccaacaagaggattggtgagtaatgaaaagccagattcgtatagtacagcagttcattttccattaactaagtcatctagagacgcagaaacattattaacttatctaaagaaaagcgatcaaacgctagtatcagttaatgatttaaaatctttaccaattgcttatactttgaaatcaccaatgggaacagaagttagtcaagatgctaaaaacgctattatggacaacgtcacattcttaagaaaacaaggattcaaagtaacagagatagacttaccaattgatggtagagcattaatgcgtgattattcaaccttggctattggcatgggaggagctttttcaacaattgaaaaagacttaaaaaaacatggttttactaaagaagacgttgatcctattacttgggcagttcatgttatttatcaaaattcagataaggctgaacttaagaaatctattatggaagcccaaaaacatatggatgattatcgtaaggcaatggagaagcttcacaagcaatttcctattttcttatcgccaacgaccgcaagtttagcccctctaaatacagatccatatgtaacagaggaagataaaagagcgatttataatatggaaaacttgagccaagaagaaagaattgctctctttaatcgccagtgggagcctatgttgcgtagaacaccttttacacaaattgctaatatgacaggactcccagctatcagtatcccgacttacttatctgagtctggtttacccatagggacgatgttaatggcaggtgcaaactatgatatggtattaattaaatttgcaactttctttgaaaaacatcatggttttaatgttaaatggcaaagaataatagataaagaagtgaaaccatctactggcctaatacagcctactaactccctctttaaagctcattcatcattagtaaatttagaagaaaattcacaagttactcaagtatctatctctaaaaaatggatgaaatcgtctgttaaaaataaaccatccgtaatggcatatcaaaaagca

SEQ ID NO: 509 - DNA, 1857 bp, Streptococcus agalactiae
aatagtactgagacaagtgcttcagtagttcctactacaaatactatcgttcaaactaatgacagtaatcctaccgcaaaatttgtatcagaatcaggacaatctgtaataggtcaagtaaaaccagataattctgcggcgcttacaacagttgacacgcctcatcatatttcagctccagatgctttaaaaacaactcaatcaagtcctgtcgttgagagtacttctactaagttaactgaagagacttacaaacaaaaagatggtaaagatttagccaacatggtgagaagtggtcaagttactagtgaggaactcgttaatatggcatacgatattattgctaaagaaaacccatctttaaatgcagtcattactactagacgccaagaagctattgaagaggctagaaaacttaaagataccaatcagccgtttttaggtgttcccttgttagtcaaggggttagggcacagtattaaaggtggtgaaaccaataatggcttgatctatgcagatggaaaaattagcacatttgacagtagctatgtcaaaaaatataaagatttaggatttattattttaggacaaacgaactttccagagtatgggtggcgtaatataacagattctaaattatacggtctaacgcataatccttgggatcttgctcataatgctggtggctcttctggtggaagtgcagcagccattgctagcggaatgacgccaattgctagcggtagtgatgctggtggttctatccgtattccatcttcttggacgggcttggtaggtttaaaaccaacaagaggattggtgagtaatgaaaagccagattcgtatagtacagcagttcattttccattaactaagtcatctagagacgcagaaacattattaacttatctaaagaaaagcgatcaaacgctagtatcagttaatgatttaaaatctttaccaattgcttatactttgaaatcaccaatgggaacagaagttagtcaagatgctaaaaacgctattatggacaacgtcacattcttaagaaaacaaggattcaaagtaacagagatagacttaccaattgatggtagagcattaatgcgtgattattcaaccttggctattggcatgggaggagctttttcaacaattgaaaaagacttaaaaaaacatggttttactaaagaagacgttgatcctattacttgggcagttcatgttatttatcaaaattcagataaggctgaacttaagaaatctattatggaagcccaaaaacatatggatgattatcgtaaggcaatggagaagcttcacaagcaatttcctattttcttatcgccaacgaccgcaagtttagcccctctaaatacagatccatatgtaacagaggaagataaaagagcgatttataatatggaaaacttgagccaagaagaaagaattgctctctttaatcgccagtgggagcctatgttgcgtagaacaccttttacacaaattgctaatatgacaggactcccagctatcagtatcccgacttacttatctgagtctggtttacccatagggacgatgttaatggcaggtgcaaactatgatatggtattaattaaatttgcaactttctttgaaaaacatcatggttttaatgttaaatggcaaagaataatagataaagaagtgaaaccatctactggcctaatacagcctactaactccctctttaaagctcattcatcattagtaaatttagaagaaaattcacaagttactcaagtatctatctctaaaaaatggatgaaatcgtctgttaaaaataaaccatccgtaatggcatatcaaaaagca

SEQ ID NO: 510 - DNA, 1825 bp, Streptococcus agalactiae
tactacaaatactatcgttcaaactaatgacagtaatcctaccgcaaaatttgtatcagaatcaggacaatctgtaataggtcaagtaaaaccagataattctgcggcgcttacaacagttgacacgcctcatcatatttcagctccagatgctttaaaaacaactcaatcaagtcctgtcgttgagagtacttctactaagttaactgaagagacttacaaacaaaaagatggtcaagatttagccaacatggtgagaagtggtcaagttactagtgaggaactcgttaatatggcatacgatattattgctaaagaaaacccatctttaaatgcagtcattactactagacgccaagaagctattgaagaggctagaaaacttaaagataccaatcagccgtttttaggtgttcccttgttagtcaaggggttagggcacagtattaaaggtggtgaaaccaataatggcttgatctatgcagatggaaaaattagcacatttgacagtagctatgtcaaaaaatataaagatttaggatttattattttaggacaaacgaactttccagagtatgggtggcgtaatataacagattctaaattatacggtctaacgcataatccttgggatcttgctcataatgctggtggctcttctggtggaagtgcagcagccattgctagcggaatgacgccaattgctagcggtagtgatgctggtggttctatccgtattccatcttcttggacgggcttggtaggtttaaaaccaacaagaggattggtgagtaatgaaaagccagattcgtatagtacagcagttcattttccattaactaagtcatctagagacgcagaaacattattaacttatctaaagaaaagcgatcaaacgctagtatcagttaatgatttaaaatctttaccaattgcttatactttgaaatcaccaatgggaacagaagttagtcaagatgctaaaaacgctattatggacaacgtcacattcttaagaaaacaaggattcaaagtaacagagatagacttaccaattgatggtagagcattaatgcgtgattattcaaccttggctattggcatgggaggagctttttcaacaattgaaaaagacttaaaaaaacatggttttactaaagaagacgttgatcctattacttgggcagttcatgttatttatcaaaattcagataaggctgaacttaagaaatctattatggaagcccaaaaacatatggatgattatcgtaaggcaatggagaagcttcacaagcaatttcctattttcttatcgccaacgaccgcaagtttagcccctctaaatacagatccatatgtaacagaggaagataaaagagcgatttataatatggaaaacttgagccaagaagaaagaattgctctctttaatcgccagtgggagcctatgttgcgtagaacaccttttacacaaattgctaatatgacaggactcccagctatcagtatcccgacttacttatctgagtctggtttacccatagggacgatgttaatggcaggtgcaaactatgatatggtattaattaaatttgcaactttctttgaaaaacatcatggttttaatgttaaatggcaaagaataatagataaagaagtgaaaccatctactggcctaatacagcctactaactccctctttaaagctcattcatcattagtaaatttagaagaaaattcacaagttactcaagtatctatctctaaaaaatggatgaaatcgtctgttaaaaataaaccatccgtaatggcatatcaaaaagca

SEQ ID NO: 511 - DNA, 1854 bp, Streptococcus agalactiae
aatagtactgagacaagtgcttcagtagctcctactacaaatactatcgttcaaactaatgacagtaatcctaccgcaaaatttgcatcagaatcaggacaatctgtaataggtcaagtaaaaccagctaattctgcggcgcttacaacagttgacacgcctcatatttcagctccagatgctttaaaaacaactcaatcaagtcctgtcgttgagagtccttctactaagttaactgaagagacatacaaacaaaaagatggtcaagatttagccaacatggtgagaagtggtcaagttactagtgaggaactcgtcaatatggcatacgatattatcgctaaagaaaacccatctttaaatgcagtcattactactagacgccaagaagccattgaagaggctagaaaacttaaagatactaatcagccgtttttaggtgttcccttgttagtcaaggggttagggcacagtattaaaggtggtgaaaccaataatggcttgatctatgcagatggaaaaattagcacatttgacagtagctatgtcaaaaaatataaagatttaggatttattattttaggacaaacgaattttccagagtatgggtggcgtaatataacagactctaaattatacggtccaacgcataatccttggaatcttgctcataacgctggtggctcttctggtggaagtgcagcagctattgctagcggaatgacgccaattgctagcggcagtgatgctggtggttctatccgtattccatcttcttggacgggcttagtaggtttaaaaccaacaagaggattggtgagtaatgaaaagccagattcgtatagtacagcagttcattttccattaactaagtcatctagagacgcagaaacattgttaacttacctaaagaaaagcgatcaaacgctagtatcagttaatgatttaaaatctttaccaattgcttatactttgaaatcaccaatgggaacagaagttagtcaagatgctaaaaatgctattatggacaacgtcacattcttaagaaaacaaggattcaaagtgacagagatagatttaccaattgatggtagagcattaatgcgtgattattcaaccttggctattggcatgggaggagctttttcaacaattgaaaaagacttaaaaaaacatggttttactaaagaagacgttgatcccattacttgggcagttcatgttatttatcaaaattcagataaggctgaacttaagaaatctattgtggaagcccaaaaacatatggatgattatcgtaaggcaatggagaagcttcacaagcaatttcctattttcttatcgccaacgaccgcaagtttagcccctctaaatacagatccatatgtaacagagaaagataaaagagcgatttataatatggaaaacttgagccaagaagaaagaattgctctctttaatcgccagtgggagcctatgttgcgtagaacaccttttacaccaattgctaatatgacaggactcccagctatcagtatcccgacttacttatctgagtctggtttacccatagggacgatgttaatggcaggtgcaaactatgatatggtattaattaaatttgcaactttctttgaaaaacatcatggttttaatgttaaatggcaaagaataatagataaagaagtgaaaccatctgctgacctaatacagcctactaactccctctttaaagctcattcatcattagtaaatttagaagaaaattcacaagttactcaagtatctatctctaaaaaatggatgaaatcgtctgttaaaaataaaccatccgtaatggcatatcaaaaagca

SEQ ID NO: 512 - DNA, 1833 bp, Streptococcus agalactiae
  misc_feature 623: n = A,T,C or G
tcagtagctcctactacaaatactatcgttcaaactaatgacagtaatcctaccgcaaaatttgcatcagaatcaggacaatctgtaataggtcaagtaaaaccagctaattctgcggcgcttacaacagttgacacgcctcatatttcagctccagatgctttaaaaacaactcaatcaagtcctgtcgttgagagtccttctactaagttaactgaagagacatacaaacaaaaagatggtcaagatttagccaacatggtgagaagtggtcaagttactagtgaggaactcgtcaatatggcatacgatattatcgctaaagaaaacccatctttaaatgcagtcattactactagacgccaagaagccattgaagaggctagaaaacttaaagatactaatcagccgtttttaggtgttcccttgttagtcaaggggttagggcacagtattaaaggtggtgaaaccaataatggcttgatctatgcagatggaaaaattagcacatttgacagtagctatgtcaaaaaatataaagatttaggatttattattttaggacaaacgaattttccagagtatgggtggcgtaatataacagactctaaattatacggtcnaacgcataatccttgggatcttgctcataacgctggtggctcttctggtggaagtgcagcagctattgctagcggaatgacgccaattgctagcggcagtgatgctggtggttctatccgtattccatcttcttggacgggcttagtaggtttaaaaccaacaagaggattggtgagtaatgaaaagccagattcgtatagtacagcagttcattttccattaactaagtcatctagagacgcagaaacattgttaacttacctaaagaaaagcgatcaaacgctagtatcagttaatgatttaaaatctttaccaattgcttatactttgaaatcaccaatgggaacagaagttagtcaagatgctaaaaatgctattatggacaacgtcacattcttaagaaaacaaggattcaaagtgacagagatagatttaccaattgatggtagagcattaatgcgtgattattcaaccttggctattggcatgggaggagctttttcaacaattgaaaaagacttaaaaaaacatggttttactaaagaagacgttgatcccattacttgggcagttcatgttatttatcaaaattcagataaggctgaacttaagaaatctattgtggaagcccaaaaacatatggatgattatcgtaaggcaatggagaagcttcacaagcaatttcctattttcttatcgccaacgaccgcaagtttagcccctctaaatacagatccatatgttacagagaaagataaaagagcgatttataatatggaaaacttgagccaagaagaaagaattgctctctttaatcgccagtgggagcctatgttgcgtagaacaccttttacaccaattgctaatatgacaggactcccagctatcagtatcccgacttacttatctgagtctggtttacccatagggacgatgttaatggcaggtgcaaactatgatatggtattaattaaatttgcaactttctttgaaaaacatcatggttttaatgttaaatggcaaagaataatagataaagaagtgaaaccatctgctgacctaatacagcctactaactccctctttaaagctcattcatcattagtaaatttagaagaaaattcacaagttactcaagtatctatctctaaaaaatggatgaaatcgtctgttaaaaataaaccatccgtaatggcatatcaaaaagca

SEQ ID NO: 513 - DNA, 1857 bp, Streptococcus agalactiae; identical to SEQ ID NO: 508

SEQ ID NO: 514 - DNA, 1837 bp, Streptococcus agalactiae
tgcttcagtagctcctactacaaatactatcgttcaaactaatgacagtaatcctaccgcaaaatttgcatcagaatcaggacaatctgtaataggtcaagtaaaaccagctaattctgcggcgcttacaacagttgacacgcctcatatttcagctccagatgctttaaaaacaactcaatcaagtcctgtcgttgagagtccttctactaagttaactgaagagacatacaaacaaaaagatggtcaagatttagccaacatggtgagaagtggtcaagttactagtgaggaactcgtcaatatggcatacgatattatcgctaaagaaaacccatctttaaatgcagtcattactactagacgccaagaagccattgaagaggctagaaaacttaaagatactaatcagccgtttttaggtgttcccttgttagtcaaggggttagggcacagtattaaaggtggtgaaaccaataatggcttgatctatgcagatggaaaaattagcacatttgacagtagctatgtcaaaaaatataaagatttaggatttattattttaggacaaacgaattttccagagtatgggtggcgtaatataacagactctaaattatacggtccaacgcataatccttggaatcttgctcataacgctggtggctcttctggtggaagtgcagcagctattgctagcggaatgacgccaattgctagcggcagtgatgctggtggttctatccgtattccatcttcttggacgggcttagtaggtttaaaaccaacaagaggattggtgagtaatgaaaagccagattcgtatagtacagcagttcattttccattaactaagtcatctagagacgcagaaacattgttaacttacctaaagaaaagcgatcaaacgctagtatcagttaatgatttaaaatctttaccaattgcttatactttgaaatcaccaatgggaacagaagttagtcaagatgctaaaaatgctattatggacaacgtcacattcttaagagaacaaggattcaaagtgacagagatagatttaccaattgatggtagagcattaatgcgtgattattcaaccttggctattggcatgggaggagctttttcaacaattgaaaaagacttaaaaaaacatggttttactaaagaagacgttgatcccattacttgggcagttcatgttatttatcaaaattcagataaggctgaacttaagaaatctattgtggaagcccaaaaacatatggatgattatcgtaaggcaatggagaagcttcacaagcaatttcctattttcttatcgccaacgaccgcaagtttagcccctctaaatacagatccatatgtaacagagaaagataaaagagcgatttataatatggaaaacttgagccaagaagaaagaattgctctctttaatcgccagtgggagcctatgttgcgtagaacaccttttacaccaattgctaatatgacaggactcccagctatcagtatcccgacttacttatctgagtctggtttacccatagggacgatgttaatggcaggtgcaaactatgatatggtattaattaaatttgcaactttctttgaaaaacatcatggttttaatgttaaatggcaaagaataatagataaagaagtgaaaccatctgctgacctaatacagcctactaactccctctttaaagctcattcatcattagtaaatttagaagaaaattcacaagttactcaagtatctatctctaaaaaatggatgaaatcgtctgttaaaaataaaccatccgtaatggcatatcaaaaagca

SEQ ID NO: 515 - DNA, 1832 bp, Streptococcus agalactiae
tagttcctactacaaatactatcgttcaaactaatgacagtaatcctaccgcaaaatttgtatcagaatcaggacaatctgtaataggtcaagtaaaaccagataattctgcggcgcttacaacagttgacacgcctcatcatatttcagctccagatgctttaaaaacaactcaatcaagtcctgtcgttgagagtacttctactaagttaactgaagagacttacaaacaaaaagatggtaaagatttagccaacatggtgagaagtggtcaagttactagtgaggaactcgttaatatggcatacgatattattgctaaagaaaacccatctttaaatgcagtcattactactagacgccaagaagctattgaagaggctagaaaacttaaagataccaatcagccgtttttaggtgttcccttgttagtcaaggggttagggcacagtattaaaggtggtgaaaccaataatggcttgatctatgcagatggaaaaattagcacatttgacagtagctatgtcaaaaaatataaagatttaggatttattattttaggacaaacgaactttccagagtatgggtggcgtaatataacagattctaaattatacggtctaacgcataatccttgggatcttgctcataatgctggtggctcttctggtggaagtgcagcagccattgctagcggaatgacgccaattgctagcggtagtgatgctggtggttctatccgtattccatcttcttggacgggcttggtaggtttaaaaccaacaagaggattggtgagtcatgaaaagccagattcgtatagtacagcagttcattttccattaactaagtcatctagagacgcagaaacattattaacttatctaaagaaaagcgatcaaacgctagtatcagttaatgatttaaaatctttaccaattgcttatactttgaaatcaccaatgggaacagaagttagtcaagatgctaaaaacgctattatggacaacgtcacattcttaagaaaacaaggattcaaagtaacagagatagacttaccaattgatggtagagcattaatgcgtgattattcaaccttggctattggcatgggaggagctttttcaacaattgaaaaagacttaaaaaaacatggttttactaaagaagacgttgatcctattacttgggcagttcatgttatttatcaaaattcagataaggctgaacttaagaaatctattatggaagcccaaaaacatatggatgattatcgtaaggcaatggagaagcttcacaagcaatttcctattttcttatcgccaacgaccgcaagtttagcccctctaaatacagatccatatgtaacagaggaagataaaagagcgatttataatatggaaaacttgagccaagaagaaagaattgctctctttaatcgccagtgggagcctatgttgcgtagaacaccttttacacaaattgctaatatgacaggactcccagctatcagtatcccgacttacttatctgagtctggtttacccatagggacgatgttaatggcaggtgcaaactatgatatggtattaattaaatttgcaactttctttgaaaaacatcatggttttaatgttaaatggcaaagaataatagataaagaagtgaaaccatctactggcctaatacagcctactaactccctctttaaagctcattcatcattagtaaatttagaagaaaattcacaagttactcaagtatctatctctaaaaaatggatgaaatcgtctgttaaaaataaaccatccgtaatggcatatcaaaaagca

SEQ ID NO: 516 - DNA, 1854 bp, Streptococcus agalactiae
aatagtactgagacaagtgcttcagtagctcctactacaaatactatcgttcaaactaatgacagtaatcctaccgcaaaatttgcatcagaatcaggacaatctgtaatatgtcaagtaaaaccagataattctgcggcgcttacaacagttgacacgcctcatatttcagctccagatgatttaaaaacaactcaatcaagtcctgtcgttgagagtacttctactaagttaactgaagagacatacaaacaaaaagatggtcaagatttagccaacatggtgagaagtggtcaagttactagtgaggaactcgtcaatatggcatacgatattattgctaaagaaaacccttctttaaatgcagtcattactactagacgccaagaagccattgaagaggctagaaaacttaaagatactaatcagccatttttaggtgttcccttgttagtcaaggggttagggcacagtattaaaggtggtgaaaccaataatggcttgatctatgcagatggaaaaattagcacatttgacagtagctatgtcaaaaaatataaagatttaggatttattattttaggacaaacgaactttccagagtatgggtggcgtaatataacagattctaaattatacggtccaacgcataaccctcggaatcttgctcataatgctggtggctcttctggtggaagtgcagcagccattgctagcggratgacgccaattgctagcggtagtgatgctggtggttctatccgtattccatcttcttggacgggcttggtaggtttaaaaccaacaagaggattggtgagtaatgaaaagccagattcgtatagtacagcagttcattttccattaactaagtcatctagagacgcagaaacattattaacttatctaaagaaaagcgatcaaacgctagtatcagttaatgatttaaaatctttaccaattgcttatactttgaaatcaccaatgggaacagaagttagtcaagatgctaaaaacgctattatggacaacgtcacattcttaagaaaacaaggattcaaagtaacagagatagacttaccaattgatggtagagcattaatgcgtgattattcaaccttggctattggcatgggaggagctttttcaacaattgaaaaagacttaaaaaaacatggttttactaaagaagacgttgatcctattacttgggcagttcatgttatttatcaaaattcagataaggctgaacttaagaaatctattatggaagcccaaaaacatatggatgattatcgtaaggcaatggagaagcttcacaagcaatttcctattttcttatcgccaacgaccgcaagtttagcccctctaaatacagatccatatgtaacagaggaagataaaagagcgatttataatatggaaaacttgagccaagaagaaagaattgctctctttaatcgccagtgggagcctatgttgcgtagaacaccttttacacaaattgctaatatgacaggactcccagctatcagtatcccgacttacttatctgagtctggtttacccatagggacgatgttaatggcaggtgcaaactatgatatggtattaattaaatttgcaactttctttgaaaaacatcatggttttaatgttaaatggcaaagaataatagataaagaagtgaaaccatctactggcctaatacagcctactaactccctctttaaagctcattcatcattagtaaatttagaagaaaattcacaagttactcaagtatctatctctaaaaaatggatgaaatcgtctgttaaaaataaaccatccgtaatggcatatcaaaaagca

SEQ ID NO: 517 - DNA, 1825 bp, Streptococcus agalactiae
ttcagtagctcctactacaaatactatcgttcaaactaatgacagtaatcctaccgcaaaattttcatcagaatcaggacaatctgtaataggtcaagtaaaaccagctaattctgtggcgcttacaacagttgacacgcctcatatttcagctccagatgctttaaaaacaactcaatcaagtcctgtcgttgagagtccttctactaagttaactgaagagacatacaaacaaaaagatggtcaagagttagccaacatggtgagaagtggtcaagttactagtgaggaactcgtcaatatggcatacgatattattgctaaagaaaacccatctttaaatgcagtcattactactagacgccaagaagctattgaagaggctagaaaacttaaagataccaatcagccgtttttaggtgttcccttgttagtcaaggggttagggcacagtattaaaggtggtgaaaccaataatggcttgatctatgcaggtggaaaaattagcacatttgacagtagctatgtcaaaaaatataaagatttaggatttattattttaggacaaacgaactttccagagtatggatggcgcaatataacagattctaaattatacggtccaacgcataacccttggaatcttgctcataatgctggtggctcttctggtggaagtgcagcagttattgctagcgggatgacgccaattgctagcggtagtgatgctggtggttctatccgtattccatcttcttggacgggcttggtaggtttaaaaccaacaagaggattggtgagtaatgaaaagccagattcgtatagtacagcagttcattttccattaactaagtcatctagagacgcagaaacattattaacttatctaaagaaaagcgatcaaacgctagtatcagttaatgatttaaaatctttaccaattgcttatactttgaaatcaccaatgggaacagaagttagtcaagatgctaaaaatgctattatggacaacgtcatattcttaagaaaacaaggattcaaagtgacagagatagacttaccaattgatggtagagcattaatgcgtgattattcaaccttggctattggtatgggaggagctttttcaacaattgaaaaagacttaaaaaaacatggttttactaaagaagacgttgatcccattacttggggagttcatgttatttatcaaaattcagataaggctgaacttaagaaatctattatggaagcccaaaaacatatggatgattatcgtaaggcaatggagaagcttcacaagcaatttcctattttcttatcgccaacgaccgcaagtttagcccctctaaatacagatccatatgtaacagaggaagataaaagagcgatttataatatggaaaacttgagccaagaagaaagaattgctctctttaatcgccagtgggagcctatgttgcgtagaacaccttttacacaaattgctaatatgacaggactcccagctatcagtatcccgacttacttatctgagtctggtttacccatagggacgatgttaatggcaggtgcaaactatgatatggtattaattaaatttgcaactttctttgaaaaatatcatggttttaatgttaaatggcaaagaataatagataaagaagtgaaaccatctactggcctaatacagcctactaactccctctttaaagctcattcatcattagtaaatttagaagaaaattcacaagttactcaagtatctatctctaaaaaatggatgaaatcgtctgttaaaaataaaccatccgtaatggcatat

SEQ ID NO: 518 - DNA, 1808 bp, Streptococcus agalactiae
cttcagtagttcctactacaaatactatcgttcaaactaatgacagtaatcctaccgcaaaattttcatcagaatcaggacaatctgtaataggtcaagtaaaaccagctaattctgtggcgcttacaacagttgacacgcctcatatttcagctccagatgctttaaaaacaactcaatcaagtcctgtcgttgagagtccttctactaagttaactgaagagacatacaaacaaaaagatggtcaagatttagccaacatggtgagaagtggtcaagttactagtgaggaactcgtcaatatggcatacgatattattgctaaagaaaacccatctttaaatgcagtcattactactagacgccaagaagctattgaagaggctagaaaacttaaagataccaatcagccgtttttaggtgttcccttgttagtcaaggggttagggcacagtattaaaggtggtgaaaccaataatggcttgatctatgcaggtggaaaaattagcacatttgacagtagctatgtcaaaaaatataaagatttaggatttattattttaggacaaacgaactttccagagtatggatggcgcaatataacagattctaaattatacggtccaacgcataacccttggaatcttgctcataatgctggtggctcttctggtggaagtgcagcagttattgctagcgggatgacgccaattgctagcggtagtgatgctggtggttctatccgtattccatcttcttggacgggcttggtaggtttaaaaccaacaagaggattggtgagtaatgaaaagccagattcgtatagtacagcagttcattttccattaactaagtcatctagagacgcagaaacattattaacttatctaaagaaaagcgatcaaacgctagtatcagttaatgatttaaaatctttaccaattgcttatactttgaaatcaccaatgggaacagaagttagtcaagatgctaaaaatgctattatggacaacgtcatattcttaagaaaacaaggattcaaagtgacagagatagacttaccaattgatggtagagcattaatgcgtgattattcaaccttggctattggtatgggaggagctttttcaacaattgaaaaagacttaaaaaaacatggttttactaaagaagacgttgatcccattacttgggcagttcatgttatttatcaaaattcagataaggctgaacttaagaaatctattatggaagcccaaaaacatatggatgattatcgtaaggcaatggagaagcttcacaagcaatttcctattttcttatcgccaacgaccgcaagtttagcccctctaaatacagatccatatgtaacagaggaagataaaagagcgatttataatatggaaaacttgagccaagaagaaagaattgctctctttaatcgccagtgggagcctatgttgcgtagaacaccttttacacaaattgctaatatgacaggactcccagctatcagtatcccgacttacttatctgagtctggtttacccatagggacgatgttaatggcaggtgcaaactatgatatggtattaattaaatttgcaactttctttgaaaaatatcatggttttaatgttaaatggcaaagaataatagataaagaagtgaaaccatctactggcctaatacagcctactaactccctctttaaagctcattcatcattagtaaatttagaagaaaattcacaagttactcaagtatctatctctaaaaaatggatgaaatcgtctgttaaaaataaa

SEQ ID NO: 519 - protein, 619 aa, Streptococcus agalactiae
NSTETSASVVPTTNTIVQTNDSNPTAKFVSESGQSVIGQVKPDNSAALTTVDTPHHISAPDALKTTQSSPVVESTSTKLTEETYKQKDGQDLANMVRSGQVTSEELVNMAYDIIAKENPSLNAVITTRRQEAIEEARKLKDTNQPFLGVPLLVKGLGHSIKGGETNNGLIYADGKISTFDSSYVKKYKDLGFIILGQTNFPEYGWRNITDSKLYGLTHNPWDLAHNAGGSSGGSAAAIASGMTPIASGSDAGGSIRIPSSWTGLVGLKPTRGLVSNEKPDSYSTAVHFPLTKSSRDAETLLTYLKKSDQTLVSVNDLKSLPIAYTLKSPMGTEVSQDAKNAIMDNVTFLRKQGFKVTEIDLPIDGRALMRDYSTLAIGMGGAFSTIEKDLKKHGFTKEDVDPITWAVHVIYQNSDKAELKKSIMEAQKHMDDYRKAMEKLHKQFPIFLSPTTASLAPLNTDPYVTEEDKRAIYNMENLSQEERIALFNRQWEPMLRRTPFTQIANMTGLPAISIPTYLSESGLPIGTMLMAGANYDMVLIKFATFFEKHHGFNVKWQRIIDKEVKPSTGLIQPTNSLFKAHSSLVNLEENSQVTQVSISKKWMKSSVKNKPSVMAYQKA

SEQ ID NO: 520 - protein, 619 aa, Streptococcus agalactiae
NSTETSASVVPTTNTIVQTNDSNPTAKFVSESGQSVIGQVKPDNSAALTTVDTPHHISAPDALKTTQSSPVVESTSTKLTEETYKQKDGKDLANMVRSGQVTSEELVNMAYDIIAKENPSLNAVITTRRQEAIEEARKLKDTNQPFLGVPLLVKGLGHSIKGGETNNGLIYADGKISTFDSSYVKKYKDLGFIILGQTNFPEYGWRNITDSKLYGLTHNPWDLAHNAGGSSGGSAAAIASGMTPIASGSDAGGSIRIPSSWTGLVGLKPTRGLVSNEKPDSYSTAVHFPLTKSSRDAETLLTYLKKSDQTLVSVNDLKSLPIAYTLKSPMGTEVSQDAKNAIMDNVTFLRKQGFKVTEIDLPIDGRALMRDYSTLAIGMGGAFSTIEKDLKKHGFTKEDVDPITWAVHVIYQNSDKAELKKSIMEAQKHMDDYRKAMEKLHKQFPIFLSPTTASLAPLNTDPYVTEEDKRAIYNMENLSQEERIALFNRQWEPMLRRTPFTQIANMTGLPAISIPTYLSESGLPIGTMLMAGANYDMVLIKFATFFEKHHGFNVKWQRIIDKEVKPSTGLIQPTNSLFKAHSSLVNLEENSQVTQVSISKKWMKSSVKNKPSVMAYQKA

SEQ ID NO: 521 - protein, 608 aa, Streptococcus agalactiae
TTNTIVQTNDSNPTAKFVSESGQSVIGQVKPDNSAALTTVDTPHHISAPDALKTTQSSPVVESTSTKLTEETYKQKDGQDLANMVRSGQVTSEELVNMAYDIIAKENPSLNAVITTRRQEAIEEARKLKDTNQPFLGVPLLVKGLGHSIKGGETNNGLIYADGKISTFDSSYVKKYKDLGFIILGQTNFPEYGWRNITDSKLYGLTHNPWDLAHNAGGSSGGSAAAIASGMTPIASGSDAGGSIRIPSSWTGLVGLKPTRGLVSNEKPDSYSTAVHFPLTKSSRDAETLLTYLKKSDQTLVSVNDLKSLPIAYTLKSPMGTEVSQDAKNAIMDNVTFLRKQGFKVTEIDLPIDGRALMRDYSTLAIGMGGAFSTIEKDLKKHGFTKEDVDPITWAVHVIYQNSDKAELKKSIMEAQKHMDDYRKAMEKLHKQFPIFLSPTTASLAPLNTDPYVTEEDKRAIYNMENLSQEERIALFNRQWEPMLRRTPFTQIANMTGLPAISIPTYLSESGLPIGTMLMAGANYDMVLIKFATFFEKHHGFNVKWQRIIDKEVKPSTGLIQPTNSLFKAHSSLVNLEENSQVTQVSISKKWMKSSVKNKPSVMAYQKA

SEQ ID NO: 522 - protein, 618 aa, Streptococcus agalactiae
NSTETSASVAPTTNTIVQTNDSNPTAKFASESGQSVIGQVKPANSAALTTVDTPHISAPDALKTTQSSPVVESPSTKLTEETYKQKDGQDLANMVRSGQVTSEELVNMAYDIIAKENPSLNAVITTRRQEAIEEARKLKDTNQPFLGVPLLVKGLGHSIKGGETNNGLIYADGKISTFDSSYVKKYKDLGFIILGQTNFPEYGWRNITDSKLYGPTHNPWNLAHNAGGSSGGSAAAIASGMTPIASGSDAGGSIRIPSSWTGLVGLKPTRGLVSNEKPDSYSTAVHFPLTKSSRDAETLLTYLKKSDQTLVSVNDLKSLPIAYTLKSPMGTEVSQDAKNAIMDNVTFLRKQGFKVTEIDLPIDGRALMRDYSTLAIGMGGAFSTIEKDLKKHGFTKEDVDPITWAVHVIYQNSDKAELKKSIVEAQKHMDDYRKAMEKLHKQFPIFLSPTTASLAPLNTDPYVTEKDKRAIYNMENLSQEERIALFNRQWEPMLRRTPFTPIANMTGLPAISIPTYLSESGLPIGTMLMAGANYDMVLIKFATFFEKHHGFNVKWQRIIDKEVKPSADLIQPTNSLFKAHSSLVNLEENSQVTQVSISKKWMKSSVKNKPSVMAYQKA

SEQ ID NO: 523 - protein, 611 aa, Streptococcus agalactiae
  VARIANT 208: Xaa = Any Amino Acid
SVAPTTNTIVQTNDSNPTAKFASESGQSVIGQVKPANSAALTTVDTPHISAPDALKTTQSSPVVESPSTKLTEETYKQKDGQDLANMVRSGQVTSEELVNMAYDIIAKENPSLNAVITTRRQEAIEEARKLKDTNQPFLGVPLLVKGLGHSIKGGETNNGLIYADGKISTFDSSYVKKYKDLGFIILGQTNFPEYGWRNITDSKLYGXTHNPWDLAHNAGGSSGGSAAAIASGMTPIASGSDAGGSIRIPSSWTGLVGLKPTRGLVSNEKPDSYSTAVHFPLTKSSRDAETLLTYLKKSDQTLVSVNDLKSLPIAYTLKSPMGTEVSQDAKNAIMDNVTFLRKQGFKVTEIDLPIDGRALMRDYSTLAIGMGGAFSTIEKDLKKHGFTKEDVDPITWAVHVIYQNSDKAELKKSIVEAQKHMDDYRKAMEKLHKQFPIFLSPTTASLAPLNTDPYVTEKDKRAIYNMENLSQEERIALFNRQWEPMLRRTPFTPIANMTGLPAISIPTYLSESGLPIGTMLMAGANYDMVLIKFATFFEKHHGFNVKWQRIIDKEVKPSADLIQPTNSLFKAHSSLVNLEENSQVTQVSISKKWMKSSVKNKPSVMAYQKA

SEQ ID NO: 524 - protein, 619 aa, Streptococcus agalactiae; identical to SEQ ID NO: 519

SEQ ID NO: 525 - protein, 612 aa, Streptococcus agalactiae
ASVAPTTNTIVQTNDSNPTAKFASESGQSVIGQVKPANSAALTTVDTPHISAPDALKTTQSSPVVESPSTKLTEETYKQKDGQDLANMVRSGQVTSEELVNMAYDIIAKENPSLNAVITTRRQEAIEEARKLKDTNQPFLGVPLLVKGLGHSIKGGETNNGLIYADGKISTFDSSYVKKYKDLGFIILGQTNFPEYGWRNITDSKLYGPTHNPWNLAHNAGGSSGGSAAAIASGMTPIASGSDAGGSIRIPSSWTGLVGLKPTRGLVSNEKPDSYSTAVHFPLTKSSRDAETLLTYLKKSDQTLVSVNDLKSLPIAYTLKSPMGTEVSQDAKNAIMDNVTFLREQGFKVTEIDLPIDGRALMRDYSTLAIGMGGAFSTIEKDLKKHGFTKEDVDPITWAVHVIYQNSDKAELKKSIVEAQKHMDDYRKAMEKLHKQFPIFLSPTTASLAPLNTDPYVTEKDKRAIYNMENLSQEERIALFNRQWEPMLRRTPFTPIANMTGLPAISIPTYLSESGLPIGTMLMAGANYDMVLIKFATFFEKHHGFNVKWQRIIDKEVKPSADLIQPTNSLFKAHSSLVNLEENSQVTQVSISKKWMKSSVKNKPSVMAYQKA

SEQ ID NO: 526 - protein, 610 aa, Streptococcus agalactiae
VPTTNTIVQTNDSNPTAKFVSESGQSVIGQVKPDNSAALTTVDTPHHISAPDALKTTQSSPVVESTSTKLTEETYKQKDGKDLANMVRSGQVTSEELVNMAYDIIAKENPSLNAVITTRRQEAIEEARKLKDTNQPFLGVPLLVKGLGHSIKGGETNNGLIYADGKISTFDSSYVKKYKDLGFIILGQTNFPEYGWRNITDSKLYGLTHNPWDLAHNAGGSSGGSAAAIASGMTPIASGSDAGGSIRIPSSWTGLVGLKPTRGLVSHEKPDSYSTAVHFPLTKSSRDAETLLTYLKKSDQTLVSVNDLKSLPIAYTLKSPMGTEVSQDAKNAIMDNVTFLRKQGFKVTEIDLPIDGRALMRDYSTLAIGMGGAFSTIEKDLKKHGFTKEDVDPITWAVHVIYQNSDKAELKKSIMEAQKHMDDYRKAMEKLHKQFPIFLSPTTASLAPLNTDPYVTEEDKRAIYNMENLSQEERIALFNRQWEPMLRRTPFTQIANMTGLPAISIPTYLSESGLPIGTMLMAGANYDMVLIKFATFFEKHHGFNVKWQRIIDKEVKPSTGLIQPTNSLFKAHSSLVNLEENSQVTQVSISKKWMKSSVKNKPSVMAYQKA

SEQ ID NO: 527 - protein, 618 aa, Streptococcus agalactiae
NSTETSASVAPTTNTIVQTNDSNPTAKFASESGQSVICQVKPDNSAALTTVDTPHISAPDDLKTTQSSPVVESTSTKLTEETYKQKDGQDLANMVRSGQVTSEELVNMAYDIIAKENPSLNAVITTRRQEAIEEARKLKDTNQPFLGVPLLVKGLGHSIKGGETNNGLIYADGKISTFDSSYVKKYKDLGFIILGQTNFPEYGWRNITDSKLYGPTHNPRNLAHNAGGSSGGSAAAIASGMTPIASGSDAGGSIRIPSSWTGLVGLKPTRGLVSNEKPDSYSTAVHFPLTKSSRDAETLLTYLKKSDQTLVSVNDLKSLPIAYTLKSPMGTEVSQDAKNAIMDNVTFLRKQGFKVTEIDLPIDGRALMRDYSTLAIGMGGAFSTIEKDLKKHGFTKEDVDPITWAVHVIYQNSDKAELKKSIMEAQKHMDDYRKAMEKLHKQFPIFLSPTTASLAPLNTDPYVTEEDKRAIYNMENLSQEERIALFNRQWEPMLRRTPFTQIANMTGLPAISIPTYLSESGLPIGTMLMAGANYDMVLIKFATFFEKHHGFNVKWQRIIDKEVKPSTGLIQPTNSLFKAHSSLVNLEENSQVTQVSISKKWMKSSVKNKPSVMAYQKA

SEQ ID NO: 528 - protein, 608 aa, Streptococcus agalactiae
SVAPTTNTIVQTNDSNPTAKFSSESGQSVIGQVKPANSVALTTVDTPHISAPDALKTTQSSPVVESPSTKLTEETYKQKDGQELANMVRSGQVTSEELVNMAYDIIAKENPSLNAVITTRRQEAIEEARKLKDTNQPFLGVPLLVKGLGHSIKGGETNNGLIYAGGKISTFDSSYVKKYKDLGFIILGQTNFPEYGWRNITDSKLYGPTHNPWNLAHNAGGSSGGSAAVIASGMTPIASGSDAGGSIRIPSSWTGLVGLKPTRGLVSNEKPDSYSTAVHFPLTKSSRDAETLLTYLKKSDQTLVSVNDLKSLPIAYTLKSPMGTEVSQDAKNAIMDNVIFLRKQGFKVTEIDLPIDGRALMRDYSTLAIGMGGAFSTIEKDLKKHGFTKEDVDPITWGVHVIYQNSDKAELKKSIMEAQKHMDDYRKAMEKLHKQFPIFLSPTTASLAPLNTDPYVTEEDKRAIYNMENLSQEERIALFNRQWEPMLRRTPFTQIANMTGLPAISIPTYLSESGLPIGTMLMAGANYDMVLIKFATFFEKYHGFNVKWQRIIDKEVKPSTGLIQPTNSLFKAHSSLVNLEENSQVTQVSISKKWMKSSVKNKPSVMAY

SEQ ID NO: 529 - protein, 602 aa, Streptococcus agalactiae
SVVPTTNTIVQTNDSNPTAKFSSESGQSVIGQVKPANSVALTTVDTPHISAPDALKTTQSSPVVESPSTKLTEETYKQKDGQDLANMVRSGQVTSEELVNMAYDIIAKENPSLNAVITTRRQEAIEEARKLKDTNQPFLGVPLLVKGLGHSIKGGETNNGLIYAGGKISTFDSSYVKKYKDLGFIILGQTNFPEYGWRNITDSKLYGPTHNPWNLAHNAGGSSGGSAAVIASGMTPIASGSDAGGSIRIPSSWTGLVGLKPTRGLVSNEKPDSYSTAVHFPLTKSSRDAETLLTYLKKSDQTLVSVNDLKSLPIAYTLKSPMGTEVSQDAKNAIMDNVIFLRKQGFKVTEIDLPIDGRALMRDYSTLAIGMGGAFSTIEKDLKKHGFTKEDVDPITWAVHVIYQNSDKAELKKSIMEAQKHMDDYRKAMEKLHKQFPIFLSPTTASLAPLNTDPYVTEEDKRAIYNMENLSQEERIALFNRQWEPMLRRTPFTQIANMTGLPAISIPTYLSESGLPIGTMLMAGANYDMVLIKFATFFEKYHGFNVKWQRIIDKEVKPSTGLIQPTNSLFKAHSSLVNLEENSQVTQVSISKKWMKSSVKNK

SEQ ID NO: 530 - DNA, 719 bp, Streptococcus agalactiae
aaacatccgatacttaatgatcaaaaatccttagcaattgttgaacagatagaatatgattttgataaattcgataattcagaagcttctttttatgcaacattagctagawttcgcgttatggatagagaaatcaaaaaatttattagagaaaatccaaatagtcaaatcctttcaattggttgtggacttgatacaaggtttgaaagagtcgataatggacaaattaggtggtataaccttgatttgccagaggttatggagataagaaaattattttttgaagagcatgaaagagttactaatatagcaaaatcagccctagatgaaacttggacacgggaggtaaatccccaaaatgccccttttctaatcgtgtcagaaggtgttttaatgtttctaaaagaagatgacgtagagacttttcttcatatcctgacaaattcatttagccaatttatggcacaatttgatttgtgtcataaggaaatgattaataaaggaaagcaacatgatacagtaaagtatatggatacagaatttcagtttggtatcacagatggtcatgagattgtggatttagaccctaaattaaagcaaataaatctgattaactttacagatgagatgagcaaatttgagttaggcacacttcgctctttacttccaacaattcgtaaatttaataattgtttaggtgtgtacgaatataaagcatc

SEQ ID NO: 531 - DNA, 705 bp, Streptococcus agalactiae
taatgatcaaaaatccttagcaattgttgaacagatagaatatgattttgataaattcgataattcagaagcttctttttatgcaacattagctagaattcgcgttatggatagagaaatcaaaaaatttattagagaaaatccaaatagtcaaatcctttcaattggttgtggacttgatacaaggtttgaaagagtcgataatggacaaattaggtggtataaccttgatttgccagaggttatggagataagaaaattattttttgaagagcatgaaagagttactaatatagcaaaatcagccatagatgaaacttggacacgggaggtaaatccccaaaatgccccttttctaatcgtgtcagaaggtgttttaatgtttctaaaagaagatgacgtagagacttttcttcatatcctgacaaattcatttagccaatttatggcacaatttgatttgtgtcataaggaaatgattaataaaggaaagcaacatgatacagtaaagtatatggatacagaatttcagtttggtatcacagatggtcatgagattgtggatttagaccctaaattaaagcaaataaatctgattaactttacagatgagatgagcaaatttgagttaggcacacttcgctctttacttccaacaattcgtaaatttaataattgtttaggtgtgtacgaatataaagcatc

SEQ ID NO: 532 - DNA, 719 bp, Streptococcus agalactiae
aaacatccgatacttaatgatcaaaaatccttagcaattgttgaacagatagaatatgattttgataaattcgataattcagaagcttctttttatgcaacattagctagaattcgcgttatggatagagaaatcaaaaaatttattagagaaaatccaaatagtcaaatcctttcaattggttgtggacttgatacaaggtttgaaagagtcgataatggacaaattaggtggtataaccttgatttgccagaggttatggagataagaaaattattttttgaagagcatgaaagagttactaatatagcaaaatcagccctagatgaaacttggacacgggaggtaaatccccaaaatgccccttttctaatcgtgtcagaaggtgttttaatgtttctaaaagaagatgacgtagagacttttcttcatatcctgacaaattcatttagccaatttatggcacaatttgatttgtgtcataaggaaatgattaataaaggaaagcaacatgatacagtaaagtatatggatacagaatttcagtttggtatcacagatggtcatgagattgtggatttagaccctaaattaaagcaaataaatctgattaactttacagatgagatgagcaaatttgagttaggcacacttcgctctttacttccaacaattcgtaaatttaataattgtttaggtgtgtacgaatataaagcatc

SEQ ID NO: 533 - DNA, 719 bp, Streptococcus agalactiae
aaacatccgatacttaatgatcaaaaatccttagcaattgttgaacagatagaatatgattttgataaattcgataattcagaagcttctttttatgcaacattagctagaattcgcgttatggatagagaaatcaaaaaatttattagagaaaatccaaatagtcatatcctttcaattggctgtggacttgatacaaggtttgaaagagtcgataatggacaaattaggtggtataaccttgatttgccagaggttatggagataagaaaattattttttgaagagcatgaaagagttactaatatagcaaaatcagccctagatgaaacttggacacgggaggtaaatccccaaaatgccccttttctaatcgtgtcagaaggtgttttaatgtttctaaaagaagatgacgtagagacttttcttcatatcctgacaaattcatttagccaatttatggcacaatttgatttgtgtcagaaggaaatgattaataaaggaaagcaacatgatacagtaaagtatatggatacagaatttcagttgggtatcacagatggtcatgaaattgtggatttagaccctaaattaaagcaaataaatctgattaactttacagatgagatgagcaaatttgagttaggcacacttcgctctttacttccaacaattcgtaaatttaataattgtttaggtgtgtacgaatataaagcatc

SEQ ID NO: 534 - DNA, 718 bp, Streptococcus agalactiae
aacatccgatacttaatgatcaaaaatccttagcaattgttgaacagatagaatatgattttgataaattcgataattcagaagcttctttttatgcaacattagctagaattcgcgttatggatagagaaatcaaaaaatttattagagaaaatccaaatagtcaaatcctttcaattggttgtggacttgatacaaggtttgaaagagtcgataatggacaaattaggtggtataaccttgatttgccagaggttatggagataagaaaattattttttgaagagcatgaaagagttactaatatagcaaaatcagccctagatgaaacttggacacgggaggtaaatccccaaaatgccccttttctaatcgtgtcagaaggtgttttaatgtttctaaaagaagatgacgtagagacttttcttcatatcctgacaaattcatttagccaatttatggcacaatttgatttgtgtcataaggaaatgattaataaaggaaagcaacatgatacagtaaagtatatggatacagaatttcagtttggtatcacagatggtcatgagattgtggatttagaccctaaattaaagcaaataaatctgattaactttacagatgagatgagcaaatttgagttaggcacacttcgctctttacttccaacaattcgtaaatttaataattgtttaggtgtgtacgaatataaagcatc

SEQ ID NO: 535 - DNA, 719 bp, Streptococcus agalactiae
aaacatccgatacttaatgatcaaaaatccttagcaattgttgaacagatagaatatgatttggataaattcgataattcagaagcttctttttatgcaacattagctagaattcgcgttatggatagagaaatcaaaaaatttattagagaaaatccaaatagtcaaatcctttcaattggttgtggacttgatacaaggtttgaaagagtcgataatggacaaattaggtggtataaccttgatttgccagaggttatggagataagaaaattattttttgaagagcatgaaagagttactaatatagcaaaatcagccctagatgaaacttggacacgggaggtaaatccccaaaatgccccttttctaatcgtgtcagaaggtgttttaatgtttctaaaagaagatgacgtagagacttttcttcatatcctgacaaattcatttagccaatttatggcacaatttgatttgtgtcataaggaaatgattaataaaggaaagcaacatgatacagtaaagtatatggatacagaatttcagtttggtatcacagatggtcatgagattgtggatttagaccctaaattaaagcaaataaatctgattaactttacagatgagatgagcaaatttgagttaggcacacttcgctctttacttccaacaattcgtaaatttaataattgtttaggtgtgtacgaatataaagcatc

SEQ ID NO: 536 - DNA, 719 bp, Streptococcus agalactiae; identical to SEQ ID NO: 535

SEQ ID NO: 537 - DNA, 719 bp, Streptococcus agalactiae; identical to SEQ ID NO: 535

SEQ ID NO: 538 - DNA, 719 bp, Streptococcus agalactiae
aaacatccgatacttaatgatcaaaaatccttagcaattgttgaacagatagaatatgattttgataaattcgataattcagaagcttctttttatgcaacattagctagaattcgcgttatggatagagaaatcaaaaaatttattagagaaaatccaaatagtcaaatcctttcaattggttgtggacttgatacaaggtttgaaagagtcgataatggacaaattaggtggtataaccttgatttgccagaggttatggagataagaaaattattttttgaagagcatgaaagagttactaatatagcaaaatcagccatagatgaaacttggacacgggaggtaaatccccaaaatgccccttttctaatcgtgtcagaaggtgttttaatgtttctaaaagaagatgacgtagagacttttcttcatatcctgacaaattcatttagccaatttatggcacaatttgatttgtgtcataaggaaatgattaataaaggaaagcaacatgatacagtaaagtatatggatacagaatttcagtttggtatcacagatggtcatgagattgtggatttagaccctaaattaaagcaaataaatctgattaactttacagatgagatgagcaaatttgagttaggcacacttcgctctttacttccaacaattcgtaaatttaataattgtttaggtgtgtacgaatataaagcatc

SEQ ID NO: 539 - DNA, 719 bp, Streptococcus agalactiae
aaacatccgatacttaatgatcaaaaatccttagcaattgttgaacagatagaatatgattttgataaattcgataattcagaagcttctttttatgcaacattagctagaattcgcgttatggatagagaaatcaaaaaatttattagagaaaatccaaatagtcatatcctttctattggttgtggacttgatacaaggtttgaaagagtcgataatggacaaattaggtggtataaccttgatttgccagaggttatggagataagaaaattattttttgaagagcatgaaagagttactaatatagcaaaatcagccctagatgaaacttggacacaggaggtaaatccccaaaatgccccttttctgatcgtgtcagaaggtgttttaatgtttctaaaagaagatgacgtagagacttttcttcatatcctgacaaattcatttagccaatttatggcacaatttgatttgtgtcagaaggaaatgattaataaaggaaagcaacatgatacagtaaagtatatggatacagaatttcagtttggtatcacagatggtcatgaaattgtggatttagaccctaaattaaagcaaataaatctgattaactttacagatgagatgagcaaatttgagttaggcacacttcgctctttacttccaacaattcgtaaatttaataattgtttaggtgtgtacgaatataaagcatc

SEQ ID NO: 540 - DNA, 687 bp, Streptococcus agalactiae
agcaattgttgaacagatagaatatgattttgataaattcgataattcagaagcttctttttatgcaacattagctagaattcgcgttatggatagagaaatcaaaaaatttattagagaaaatccaaatagtcatatcctttcaattggctgtggacttgatacaaggtttgaaagagtcgataatggacaaattaggtggtataaccttgatttgccagaggttatggagataagaaaattattttttgaagagcatgaaagagttactaatatagcaaaatcagccctagatgaaacttggacacgggaggtaaatccccaaaatgccccttttctaatcgtgtcagaaggtgttttaatgtttctaaaagaagatgacgtagagacttttcttcatatcctgacaaattcatttagccaatttatggcacaatttgatttgtgtcagaaggaaatgattaataaaggaaagcaacatgatacagtaaagtatatggatacagaatttcagtttggtatcacagatggtcatgaaattgtggatttagaccctaaattaaagcaaataaatctgattaactttacagatgagatgagcaaatttgagttaggcacacttcgctctttacttccaacaattcgtaaatttaataattgtttaggtgtgtacgaatataaagcatc

SEQ ID NO: 541 - protein, 239 aa, Streptococcus agalactiae
  VARIANT 38: Xaa = Any Amino Acid
KHPILNDQKSLAIVEQIEYDFDKFDNSEASFYATLARXRVMDREIKKFIRENPNSQILSIGCGLDTRFERVDNGQIRWYNLDLPEVMEIRKLFFEEHERVTNIAKSALDETWTREVNPQNAPFLIVSEGVLMFLKEDDVETFLHILTNSFSQFMAQFDLCHKEMINKGKQHDTVKYMDTEFQFGITDGHEIVDLDPKLKQINLINFTDEMSKFELGTLRSLLPTIRKFNNCLGVYEYKA

SEQ ID NO: 542 - protein, 234 aa, Streptococcus agalactiae
NDQKSLAIVEQIEYDFDKFDNSEASFYATLARIRVMDREIKKFIRENPNSQILSIGCGLDTRFERVDNGQIRWYNLDLPEVMEIRKLFFEEHERVTNIAKSAIDETWTREVNPQNAPFLIVSEGVLMFLKEDDVETFLHILTNSFSQFMAQFDLCHKEMINKGKQHDTVKYMDTEFQFGITDGHEIVDLDPKLKQINLINFTDEMSKFELGTLRSLLPTIRKFNNCLGVYEYKA

SEQ ID NO: 543 - protein, 239 aa, Streptococcus agalactiae
KHPILNDQKSLAIVEQIEYDFDKFDNSEASFYATLARIRVMDREIKKFIRENPNSQILSIGCGLDTRFERVDNGQIRWYNLDLPEVMEIRKLFFEEHERVTNIAKSALDETWTREVNPQNAPFLIVSEGVLMFLKEDDVETFLHILTNSFSQFMAQFDLCHKEMINKGKQHDTVKYMDTEFQFGITDGHEIVDLDPKLKQINLINFTDEMSKFELGTLRSLLPTIRKFNNCLGVYEYKA

SEQ ID NO: 544 - protein, 239 aa, Streptococcus agalactiae
KHPILNDQKSLAIVEQIEYDFDKFDNSEASFYATLARIRVMDREIKKFIRENPNSHILSIGCGLDTRFERVDNGQIRWYNLDLPEVMEIRKLFFEEHERVTNIAKSALDETWTREVNPQNAPFLIVSEGVLMFLKEDDVETFLHILTNSFSQFMAQFDLCQKEMINKGKQHDTVKYMDTEFQLGITDGHEIVDLDPKLKQINLINFTDEMSKFELGTLRSLLPTIRKFNNCLGVYEYKA

SEQ ID NO: 545 - protein, 238 aa, Streptococcus agalactiae
HPILNDQKSLAIVEQIEYDFDKFDNSEASFYATLARIRVMDREIKKFIRENPNSQILSIGCGLDTRFERVDNGQIRWYNLDLPEVMEIRKLFFEEHERVTNIAKSALDETWTREVNPQNAPFLIVSEGVLMFLKEDDVETFLHILTNSFSQFMAQFDLCHKEMINKGKQHDTVKYMDTEFQFGITDGHEIVDLDPKLKQINLINFTDEMSKFELGTLRSLLPTIRKFNNCLGVYEYKA

SEQ ID NO: 546 - protein, 239 aa, Streptococcus agalactiae
KHPILNDQKSLAIVEQIEYDLDKFDNSEASFYATLARIRVMDREIKKFIRENPNSQILSIGCGLDTRFERVDNGQIRWYNLDLPEVMEIRKLFFEEHERVTNIAKSALDETWTREVNPQNAPFLIVSEGVLMFLKEDDVETFLHILTNSFSQFMAQFDLCHKEMINKGKQHDTVKYMDTEFQFGITDGHEIVDLDPKLKQINLINFTDEMSKFELGTLRSLLPTIRKFNNCLGVYEYKA

SEQ ID NO: 547 - protein, 239 aa, Streptococcus agalactiae; identical to SEQ ID NO: 546

SEQ ID NO: 548 - protein, 239 aa, Streptococcus agalactiae; identical to SEQ ID NO: 546

SEQ ID NO: 549 - protein, 239 aa, Streptococcus agalactiae
KHPILNDQKSLAIVEQIEYDFDKFDNSEASFYATLARIRVMDREIKKFIRENPNSQILSIGCGLDTRFERVDNGQIRWYNLDLPEVMEIRKLFFEEHERVTNIAKSAIDETWTREVNPQNAPFLIVSEGVLMFLKEDDVETFLHILTNSFSQFMAQFDLCHKEMINKGKQHDTVKYMDTEFQFGITDGHEIVDLDPKLKQINLINFTDEMSKFELGTLRSLLPTIRKFNNCLGVYEYKA

SEQ ID NO: 550 - protein, 239 aa, Streptococcus agalactiae
KHPILNDQKSLAIVEQIEYDFDKFDNSEASFYATLARIRVMDREIKKFIRENPNSHILSIGCGLDTRFERVDNGQIRWYNLDLPEVMEIRKLFFEEHERVTNIAKSALDETWTQEVNPQNAPFLIVSEGVLMFLKEDDVETFLHILTNSFSQFMAQFDLCQKEMINKGKQHDTVKYMDTEFQFGITDGHEIVDLDPKLKQINLINFTDEMSKFELGTLRSLLPTIRKFNNCLGVYEYKA

SEQ ID NO: 551 - protein, 228 aa, Streptococcus agalactiae
AIVEQIEYDFDKFDNSEASFYATLARIRVMDREIKKFIRENPNSHILSIGCGLDTRFERVDNGQIRWYNLDLPEVMEIRKLFFEEHERVTNIAKSALDETWTREVNPQNAPFLIVSEGVLMFLKEDDVETFLHILTNSFSQFMAQFDLCQKEMINKGKQHDTVKYMDTEFQFGITDGHEIVDLDPKLKQINLINFTDEMSKFELGTLRSLLPTIRKFNNCLGVYEYKA

SEQ ID NO: 552 - DNA, 549 bp, Streptococcus agalactiae
atgaaaaaacaaaaactattactgcttattggaggcttattaataatgataatgatgacagcatgtaaggattcaaaaatcccagaaaaccgcacaaaggaagagtaccaagctgaacaaaattttaaaccgttttttgagtttttagcacaaaaagataaagatttgagcaaaatacaaaaatacttactattagtatcggattcaggtgatgcattagatttagaatatttctatagtattcaagatttaaaaaaaaataaggatttagggaagtttgaaacaagaaaaagtcaaatagaaaagccgggtggctataatgagttagaaaataaagaggtcccatttgaatattttaaaaataatatagtttatccaaaaggaaaaccgaatattacatttgatgactttattatcggagcaatggatactaaagaattaaaagaattaaaaaaattaaaagtaaaaagttatttattaaaacatccggaaactgagttgaaagatataacatatgaattgccgacacagtcgaagcttattaaaaaa

SEQ ID NO: 553 - DNA, 475 bp, Streptococcus agalactiae
taaggattcaaaaatcccagaaaaccgcacaaaggaagagtaccaagctgaacaaaattttaaactgttttttgagtttttagcacaaaaatataaagatttgaacaaaatacaaaaatacttactattagtatcggattcaggtgatgcattagatttagaatatttctatagtattcaagatttaaaaaaaaataaggatttagggaagtttgaaacaagaaaaagtcaaatagaaaagccgggtggctataatgagttagaaaataaagaggtcccatttgaatattttaaaaataatatagtttatccaaaaggaaaaccgaatattacatttgatgactttattatcggagcaatggatactaaagaattaaaaaaattaaaagtaaaaagttatttattaaaacatccggaaactgagttgaaagatataacatatgaattgccgacacagtcgaagcttattaaaaaa

SEQ ID NO: 554 - DNA, 493 bp, Streptococcus agalactiae
taaggattcaaaaatcccagaaaaccgcacaaaggaagagtaccaagctgaacaaaattttaaaccgttttttgagtttttagcacaaaaagataaagatttgagcaaaatacaaaaatacttactattagtatcggattcaggtgatgcattagatttagaatatttctatagtattcaagatttaaaaaaaaataaggatttagggaagtttgaaacaagaaaaagtcaaatagaaaagccgggtggctataatgagttagaaaataaagaggtcccatttgaatattttaaaaataatatagtttatccaaaaggaaaaccgaatattacatttgatgactttattatcggagcaatggatactaaagaattaaaagaattaaaagaattaaaaaaattaaaagtaaaaagttatttattaaaacatccggaaactgagttgaaagatataacatatgaattgccggcacagtcgaagcttattaaaaaa

SEQ ID NO: 555 - protein, 183 aa, Streptococcus agalactiae
MKKQKLLLLIGGLLIMIMMTACKDSKIPENRTKEEYQAEQNFKPFFEFLAQKDKDLSKIQKYLLLVSDSGDALDLEYFYSIQDLKKNKDLGKFETRKSQIEKPGGYNELENKEVPFEYFKNNIVYPKGKPNITFDDFIIGAMDTKELKELKKLKVKSYLLKHPETELKDITYELPTQSKLIKK

SEQ ID NO: 556 - protein, 158 aa, Streptococcus agalactiae
KDSKIPENRTKEEYQAEQNFKLFFEFLAQKYKDLNKIQKYLLLVSDSGDALDLEYFYSIQDLKKNKDLGKFETRKSQIEKPGGYNELENKEVPFEYFKNNIVYPKGKPNITFDDFIIGAMDTKELKKLKVKSYLLKHPETELKDITYELPTQSKLIKK

SEQ ID NO: 557 - protein, 164 aa, Streptococcus agalactiae
KDSKIPENRTKEEYQAEQNFKPFFEFLAQKDKDLSKIQKYLLLVSDSGDALDLEYFYSIQDLKKNKDLGKFETRKSQIEKPGGYNELENKEVPFEYFKNNIVYPKGKPNITFDDFIIGAMDTKELKELKELKKLKVKSYLLKHPETELKDITYELPAQSKLIKK

SEQ ID NO: 558 - DNA, 3243 bp, Streptococcus agalactiae
ttgaataataaaggtgtcggtggcgatggtgtccaaatttatcaatactatatcaaaatggacaacaataaaccttacttaagtcccaaagataagactactgtagagaagttagaagatcgctggaaaaaaattactttcaaagttcaggatactggcattggtttgaaagacgtttatcttcaatctgttaagtatgttggtggtggcaataataatttagaccttatcacacctccaggatttaaaaaagaagataaaaaagttgaaaaaccaaaattagaccgtccaccaggaattgatttaccagcaccaacttcaatgagaagttttgattattcaaccccaccgggaactaagccaagcaaacccaaagatagtttatcaactcctccaggtttcccagatttaaacacgccgccggatgaagcaccaaaggatagtaaaaaagacgctattgaagataaatcaggagcaattaaatatgctaagtctcttcaacttagctttgttgatggccctattttagctagcaaagtaaatggcaaaatattacaagtcgaatctgatggcaaattagtcattcctagaaatgctttgtcagctaatcaatttgatgacactagtcttaaaatttatcgtaataataatcgcaataaagaaattactatcacaacagattattttgcagatacaaaatatgtcaatatcacagcggttgactatttgagcaatactacttttgagcaattagctactggtgaaacagtagattaccatgccattgtattttcaagctttgctgctattaaagacaagggtggtaagatttatgttaacgataaattgcaagaaacttctcgtatagcgcttaaagataaatctgttaagattggtattgaattaccaaatgatgtcagacatattgatagtttatctgttcgtcgtttgaatgaggttaaaactgttgataatatcttgaaaaatgatgaacaagacattaatctcagcaaaacttaccaattaaaatacaacccgacaaatcgtcgtctagagtttactattaataacattaactcaagttcagaaatcatgaccactttcaaagatggaaagatgccagaattggttgaacaaaaagatgtttctttggatataaacgatatggacatgagtaagtttaaaactattcgacttggacgaaaggattctgaatttaagggacaacttattgcaaaaactggaacagttgaattagatatgtttttcaaacaatctcaagacccagcttcaattattaaaaaaatataccttatccaaaatggtgttccaaatgaattgaaaaaatttgactctagttttggtttaactgaaagtcagatagatggatactatatttataaagatgcaattaaccttaaatttaaattaaccagtggtgcaagtcttaaagttgtttataaagggcaagaagatccatatagtcatcagaaagaagatatgactaaaaaaggtgaacagctcagtcattcaactcaagccaatgaaaatacagcaaaagtaacctttgctaatattgactggtcacattatagtaaggttactgtgaatggaaaagaagttgttaaaggtagtgagttacctttaactaaaggatggacaacatttgtattacataaaacagaaaattcattaaatgttaaaagtttgattatggagacgggtagtgtaagtaagaaagttcaacaacttcctttaagtcctagattatctaaaaataagcatatgagggatatgctacttactatgcaaaaagattcagcgtattacgaaacaagtgacagtctagtccttcgaattaatctcactgcagatactaaacttaattttaatgctgttaaaggagcgagtgctcttactgaaaatatgatgatgagacagtttgcagttgctggaccacaagatgatcctgttagtgaacataaatacccatcagtatttctcttaactcctgccttattggaaactgctagtgaggcaactctaaatggtaaggaaatcacagcatctggtattatcggtcacatcaaggatggtgataaaagcaagcatgttgaagtcaaaatggtgaatgaaaatggagacatgctaggaacccctgttattattcaaggtaaagacttgactaatcgaacaaaaccattaatgagtggacgtagagtactttatgccggtaaacaatatgagttccgggctaaattaccacttagtcgttttaacacttggattagggttgaagtggtaacagaagcaggagagaaagcaagtattgttcgtcgcatgttctttgaccaatcagttccagagcttaacacagcagttgctaaacgtgatttgacttctgatactgctcttatccacatcgttgccaaagatgactctctaaaactaaaattatatcaagatgattcattacttgaatctgttgataaaaccggtctttatagttttagaaatggtgtagaaatcactaaagatatgacagtaccactagaatttggagataatattattaagttatctgctgttgacttatcaaattatcgtcgtaatgagacccttcatatctatagaaaccgttttgatgttaaagcaagccaaatgacagctgacaaaggagctaaagtaactgtggatatgttgatgaagcacttagttgttccagaaatggcaggagcttatacattaacaatcgacgaagctccaaacacaaatgaatcaggaatgttaacaaacgctaaagtatcgattcattatgtaaatggtggtgttgataaagttgatgttccgattaaagtagttgacttagaagctattcgtaaagctgaagaagcacgtaaagctgaagaagcacgtaaagctgaagaagcacgtaaagctgaagagggacataaaacccaagaagcacctatagttgaagaaggctacaaggttaataacgttcatcaaactgatactacagttaaagcgtctgatttaccaaagactaagacagtttccgcagttcatatggctagaacagacaataaacagataacttcacatcagacacatgttgaaaaacaaattaaaaatacattgccatccactggtgacagcaaacgtggttattatatcactggaatggctatcgttatgctgagtgtattatttagtttagctaaaaagtttaaaagcaaatat

SEQ ID NO: 559 - DNA, 3172 bp, Streptococcus agalactiae
ttgaataataaaggtgtcggtggcgatggtgtccaaatttatcaatactatatcaaaatggacaacaataaaccttacttaagtcccaaagataagactactgtagagaagttagaagatcgctggaaaaaaattactttcaaagttcaggatactggcattggtttgaaagacgtttatcttcaatctgttaagtatgttggtggtggcaataataatttagaccttatcacacctccaggatttaaaaaagaagataaaaaagttgaaaaaccaaaattagaccgtccaccaggaattgatttaccaccaccaacttcaatgagaagttttgattattcaaccccaccgggaactaagccaagcaaacccaaagatagtttatcaactcctccaggtttcccagatttaaacacgccgccggatgaagcactaaaggatagtaaaaaagacgctattgaagataaatcaggagcaattaaatatgctaagtctcttcaacttagctttgttgatgaccctattttagctagcaaagtaaatggcaaaatattacaagtcgaatctgatggcaaattagtcattcctagaaatgctttgtcagctaatcaatttgatgacactagtcttaaaatttatcgtaataataatcgcaataaagaaattactatcacaacagattattttgcagatacaaaatatgtcaatatcacagcggttgactatttgagcaatactacttttgagcaattagctactggtgaaacagtagattaccatgccattgtattttcaagctttgctgctattaaagacaagggtggtaagatttatgttaacgataaattgcaagaaacttctcgtatagcgcttaaagataaatctgttaagattggtattgaattaccaaatgatgtcagacatattgatagtttatctgttcgtcgtttgaatgaggttaaaactgttgataatatcttgaaaaatgatgaacaagacattaatctcagcaaaacttaccaattaaaatacaacccgacaaatcgtcgtctagagtttactattaataacattaactcaagttcagaaatcatgaccactttcaaagatggaaagatgccagaattggttgaacaaaaagatgtttctttggatataaacgatatggacatgagtaagtttaaaactattcgacttggacgaaaggattctgaatttaagggacaacttattgcaaaaactggaacagttgaattagatatgtttttcaaacaatctcaagacccagcttcaattattaaaaaaatataccttatccaaaatggtgttccaaatgaattgaaaaaatttgactctagttttggtttaactgaaagtcagatagatggatactatatttataaagatgcaattaaccttaaatttaaattaaccagtggtgcaagtcttaaagttgtttataaagggcaagaagatccatatagtcatcagaaagaagatatgactaaaaaaggtgaacagctcagtcattcaactcaagccaatgaaaatacagcaaaagtaacctttgctaatattgactggtcacattatagtaaggttactgtgaatggaaaagaagttggtaaaggtagtgagttacctttaactaaaggatggacaacatttgtattacataaaacagaaaattcattaaatgttaaaagtttgattatggagacgggtagtgtaagtaagaaagttcaacaacttcctttaagtcctagattatctaaaaataagcatatgagggatatgctacttactatgcaaaaagattcagcgtattacgaaacaagtgacagtctagtccttcgaattaatctcactgcagatactaaacttaattttaatgctgttaaaggagcgagtgctcttactgaaaatatgatgatgagacagtttgcagttgctggaccacaagatgatcctgttagtgaacataaatacccatcagtatttctcttaactcctgccttattggaaactgctagtgaggcaactctaaatggtaaggaaatcacagcatctggtattatcggtcacatcaaggatggtgataaaagcaagcatgttgaagtcaaaatggtgaatgaaaatggagacatgctaggaacccctgttattattcaaggtaaagacttgactaatcgaacaaaaccattaatgagtggacgtagagtactttatgccggtaaacaatatgagttccgggctaaattaccacttagtcgttttaacacttggattagggttgaagtggtaacagaagcaggagagaaagcaagtattgttcgtcgcatgttctttgaccaatcagttccagagcttaacacagcagttgctaaacgtgatttgacttctgatactgctcttatccacatcgttgccaaagatgactctctaaaactaaaattatatcaagatgattcattacttgaatctgttgataaaaccggtctttatagttttagaaatggtgtagaaatcactaaagatatgacagtaccactagaatttggagataatattattaagttatctgctgttgacttatcaaattatcgtcgtaatgagacccttcatatctatagaaaccgttttgatgttaaagcaagccaaatgacagctgacaaaggagctaaagtaactgtggatatgttgatgaagcacttagttgttccagaaatggcaggagcttatacattaacaatcgacgaagatccaaacacaaatgaatcaggaatgttaacaaacgctaaagtatcgattcattatgtaaatggtggtgttgataaagttgatgttccgattaaagtagttgacttagaagctattcgtaaagctgaagaagcacataaagctgacgaagcacgtaaagctgaagaagcacgtaaagctgaagaagcacgtaaagctgaagaagcacgtaaagctgaagagggacataaaacccaagaagcacctatagttgaagaaggctacaaggttaataacgttcatcaaactgatactacagttaaagcgtctgatttaccaaagactaagacagtttccgcagttcatatggctagaacagacaataaacagataacttcacatcagacacatgttgaaaaacaaattaaaaata

SEQ ID NO: 560 - DNA, 3161 bp, Streptococcus agalactiae
tggtgtccaaatttatcaatactatatcaaaatggacaacaataaaccttacttaagtcccaaagataagactactgtagagaagttagaagatcgctggaaaaaaattactttcaaagttcaggatactggcattggtttgaaagacgtttatcttcaatctgttaagtatgttggtggtggcaataataatttagaccttatcacacctccaggatttaaaaaagaagataaaaaagttgaaaaaccaaaattagaccgtccaccaggaattgatttaccagcaccaacttcaatgagaagttttgattattcaaccccaccgggaactaagccaagcaaacccaaagatagtttatcaactcctccaggtttcccagatttaaacacgccgccggatgaagcactaaaggatagtaaaaaagacgctattgaagataaatcaggagcaattaaatatgctaagtctcttcaacttagctttgttgatgaccctattttagctagcaaagtaaatggcaaaatattacaagtcgaatctgatggcaaattagtcattcctagaaatgctttgtcagctaatcaatttgatgacactagtcttaaaatttatcgtaataataatcgcaataaagaaattactatcacaacagattattttgcagatacaaaatatgtcaatatcacagcggttgactatttgagcaatactacttttgagcaattagctactggtgaaacagtagattaccatgccattgtattttcaagctttgctgctattaaagacaagggtggtaagatttatgtcaacgataaattgcaagaaacttctcgtatagcgcttaaagataaatctgttaagattggtattgaattaccaaatgatgtcagacatattgatagtttatctgttcgtcgtttgaatgaggttaaaactgttgataatatcttgaaaaatgatgaacaagacattaatctcagcaaaacttaccaattaaaatacaacccgacaaatcgtcgtctagagtttactattaataacattaactcaagttcagaaatcatgaccactttcaaagatggaaagatgccagaattggttgaacaaaaagatgtttctttggatataaacgatatggacatgagtaagtttaaaactattcgacttggacgaaaggattctgaatttaagggacaacttattgcaaaaactggaacagttgaattagatatgtttttcaaacaatctcaagacccagcttcaattattaaaaaaatataccttatccaaaatggtgttccaaatgaattgaaaaaatttgactctagttttggtttaactgaaagtcagatagatggatactatatttataaagatgcaattaaccttaaatttaaattaaccagtggtgcaagtcttaaagttgtttataaagggcaagaagatccatatagtcatcagaaagaagatatgactaaaaaaggtgaacagctcagtcattcaactcaagccaatgaaaatacagcaaaagtaacctttgctaatattgactggtcacattatagtaaggttactgtgaatggaaaagaagttggtaaaggtagtgagttacctttaactaaaggatggacaacatttgtattacataaaacagaaaattcattaaatgttaaaagtttgattatggagacgggtagtgtaagtaagaaagttcaacaacttcctttaagtcctagattatctaaaaataagcatatgagggatatgctacttactatgcaaaaagattcagcgtattacgaaacaagtgacagtctagtccttcgaattaatctcactgcagatactaaacttaattttaatgctgttaaaggagcgagtgctcttactgaaaatatgatgatgagacagtttgcagttgctggaccacaagatgatcctgttagtgaacataaatacccatcagtatttctcttaactcctgccttattggaaactgctagtgaggcaactctaaatggtaaggaaatcacagcatctggtattatcggtcacatcaaggatggtgataaaagcaagcatgttgaagtcaaaatggtgaatgaaaatggagacatgctaggaacccctgttattattcaaggtaaagacttgactaatcgaacaaaaccattaatgagtggacgtagagtactttatgccggtaaacaatatgagttccgggctaaattaccacttagtcgttttaacacttggattagggttgaagtggtaacagaagcaggagagaaagcaagtattgttcgtcgcatgttctttgaccaatcagttccagagcttaacacagcagttgctaaacgtgatttgacttctgatactgctcttatccacatcgttgccaaagatgactctctaaaactaaaattatatcaagatgattcattacttgaatctgttgataaaaccggtctttatagttttagaaatggtgtagaaatcactaaagatatgacagtaccactagaatttggagataatattactaagttatctgctgttgacttatcaaattatcgtcgtaatgagacccttcatatctatagaaaccgttttgatgttaaagcaagccaaatgacagctgacaaaggagctaaagtaactgtggatatgttgatgaagcacttagttgttccagaaatggcaggagcttatacattaacaatcgacgaagctccaaacacaaatgaatcaggaatgttaacaaacgctaaagtatcgattcattatgtaaatggtggtgttgataaagttgatgttccgattaaagtagttgacttagaagctattcgtaaagctgaagaagcacataaagctgacgaagcacgtaaagctgaagaagcacgtaaagctgacgaagcacataaagctgaagaagtacgtaaagctgaagaagcacataaagtcgaagaagcacgtaaagctgaagagggacataaaacccaagaagcacctatagttgaagaaggctacaaggttaataacgttcatcaaactgatactacagttaaagcgtctgatttaccaaagactaagacagtttccgcagttcatatggctagaacagacaataaacagataacttcacatcagacacatg

SEQ ID NO: 561 - DNA, 3102 bp, Streptococcus agalactiae
ttgaataataaaggtgtcggtggcgatggtgtccaaatttatcaatactatatcaaaatggacaacaataaaccttacttaagtcccaaagataagactactgtagagaagttagaagatcgctggaaaaaaattactttcaaagttcaggatactggcattggtttgaaagacgtttatcttcaatctgttaagtatgttggtggtggcaataataatttagaccttatcacacctccaggatttaaaaaagaagataaaaaagttgaaaaaccaaaattagaccgtccaccaggaattgatttaccagcaccaacttcaatgagaagttttgattattcaaccccaccgggaactaagccaagcaaacccaaagatagtttatcaactcctccaggtttcccagatttaaacacgccgccggatgaagcaccaaaggatagtaaaaaagacgctattgaagataaatcaggagcaattaaatatgctaagtctcttcaacttagctttgttgatgaccctattttagctagcaaagtaaatggcaaaatattacaagtcgaatctgatggcaaattagtcattcctagaaatgctttgtcagctaatcaatttgatgacactagtcttaaaatttatcgtaataataatcgcaataaagaaattactatcacaacagattattttgcagatacaaaatatgtcaatatcacagcggttgactatttgagcaatactacttttgagcaattagctactggtgaaacagtagattaccatgccattgtattttcaagctttgctgctattaaagacaagggtggtaagatttatgttaacgataaattgcaagaaacttctcgtatagcgcttaaagataaatctgttaagattggtattgaattaccaaatgatgtcagacatattgatagtttatctgttcgtcgtttgaatgaggttaaaactgttgataatatcttgaaaaatgatgaacaagacattaatctcagcaaaacttaccaattaaaatacaacccgacaaatcgtcgtctagagtttactattaataacattaactcaagttcagaaatcatgaccactttcaaagatggaaagatgccagaattggttgaacaaaaagatgtttctttggatataaacgatatggacatgagtaagtttaaaactattcgacttggacgaaaggattctgaatttaagggacaacttattgcaaaaactggaacagttgaattagatatgtttttcaaacaatctcaagacccagcttcaattattaaaaaaatataccttatccaaaatggtgttccaaatgaattgaaaaaatttgactctagttttggtttaactgaaagtcagatagatggatactatatttataaagatgcaattaaccttaaatttaaattaaccagtggtgcaagtcttaaagttgtttataaagggcaagaagatccatatagtcatcagaaagaagatatgactaaaaaaggtgaacagctcagtcattcaactcaagccaatgaaaatacagcaaaagtaacctttgctaatattgactggtcacattatagtaaggttactgtgaatggaaaagaagttgttaaaggtagtgagttacctttaactaaaggatggacaacatttgtattacataaaacagaaaattcattaaatgttaaaagtttgattatggagacgggtagtgtaagtaagaaagttcaacaacttcctttaagtcctagattatctaaaaataagcatatgagggatatgctacttactatgcaaaaagattcagcgtattacgaaacaagtgacagtctagtccttcgaattaatctcactgcagatactaaacttaattttaatgctgttaaaggagcgagtgctcttactgaaaatatgatgatgagacagtttgcagttgctggaccacaagatgatcctgttagtgaacataaatacccatcagtatttctcttaactcctgccttattggaaactgctagtgaggcaactctaaatggtaaggaaatcacagcatctggtattatcggtcacatcaaggatggtgataaaagcaagcatgttgaagtcaaaatggtgaatgaaaatggagacatgctaggaacccctgttattattcaaggtaaagacttgactaatcgaacaaaaccattaatgagtggacgtagagtactttatgccggtaaacaatatgagttccgggctaaattaccacttagtcgttttaacacttggattagggttgaagtggtaacagaagcaggagagaaagcaagtattgttcgtcgcatgttctttgaccaatcagttccagagcttaacacagcagttgctaaacgtgatttgacttctgatactgctcttatccacatcgttgccaaagatgactctctaaaactaaaattatatcaagatgattcattacttgaatctgttgataaaaccggtctttatagttttagaaatggtgtagaaatcactaaagatatgacagtaccactagaatttggagataatattattaagttatctgctgttgacttatcaaattatcgtcgtaatgagacccttcatatctatagaaaccgttttgatgttaaagcaagccaaatgacagctgacaaaggagctaaagtaactgtggatatgttgatgaagcacttagttgttccagaaatggcaggagcttatacattaacaatcgacgaagctccaaacacaaatgaatcaggaatgttaacaaacgctaaagtatcgattcattatgtaaatggtggtgttgataaagttgatgttccgattaaagtagttgacttagaagctattcgtaaagctgaagaagcacgtaaagctgaagaagcacgtaaagctgaagagggacataaaacccaagaagcacctatagttgaagaaggctacaaggttaataacgttcatcaaactgatactacagttaaagcgtctgatttaccaaagactaagacagtttccgcagttcatatggctagaacagacaataaacagataacttcacatcagacacatgttgaa

SEQ ID NO: 562 - DNA, 3195 bp, Streptococcus agalactiae
ttgaataataaaggtgtcggtggcgatggtgtccaaatttatcaatactatatcaaaatggacaacaataaaccttacttaagtcccaaagataagactactgtagagaagttagaagatcgctggaaaaaaattactttcaaagttcaggatactggcattggtttgaaagacgtttatcttcaatctgttaagtatgttggtggtggcaataataatttagaccttatcacacctccaggatttaaaaaagaagataaaaaagttgaaaaaccaaaattagaccgtccaccaggaattgatttaccagcaccaacttcaatgagaagttttgattattcaaccccaccgggaactaagccaagcaaacccaaagatagtttatcaactcctccaggtttcccagatttaaacacgccgccggatgaagccaccaaaggatagtaaaaaagacgctattgaagataaatcaggagcaattaaatatgctaagtctcttcaacttagctttgttgatgaccctattttagctagcaaagtaaatggcaaaatattacaagtcgaatctgatggcaaattagtcattcctagaaatgctttgtcagctaatcaatttgatgacactagtcttaaaatttatcgtaataataatcgcaataaagaaattactatcacaacagattattttgcagatacaaaatatgtcaatatcacagcggttgactatttgagcaatactacttttgagcaattagctactggtgaaacagtagattaccatgccattgtattttcaagctttgctgctattaaagacaagggtggtaagatttatgttaacgataaattgcaagaaacttctcgtatagcgcttaaagataaatctgttaagattggtattgaattaccaaatgatgtcagacatattgatagtttatctgttcgtcgtttgaatgaggttaaaactgttgataatatcttgaaaaatgatgaacaagacattaatctcagcaaaacttaccaattaaaatacaacccgacaaatcgtcgtctagagtttactattaataacattaactcaagttcagaaatcatgaccactttcaaagatggaaagatgccagaattggttgaacaaaaagatgtttctttggatataaacgatatggacatgagtaagtttaaaactattcgacttggacgaaaggattctgaatttaagggacaacttattgcaaaaactggaacagttgaattagatatgtttttcaaacaatctcaagacccagcttcaattattaaaaaaatataccttatccaaaatggtgttccaaatgaattgaaaaaatttgactctagttttggtttaactgaaagtcagatagatggatactatatttataaagatgcaattaaccttaaatttaaattaaccagtggtgcaagtcttaaagttgtttataaagggcaagaagatccatatagtcatcagaaagaagatatgactaaaaaaggtgaacagctcagtcattcaactcaagccaatgaaaatacagcaaaagtaacctttgctaatattgactggtcacattatagtaaggttactgtgaatggaaaagaagttggtaaaggtagtgagttacctttaactaaaggatggacaacatttgtattacataaaacagaaaattcattaaatgttaaaagtttgattatggagacgggtagtgtaagtaagaaagttcaacaacttcctttaagtcctagattatctaaaaataagcatatgagggatatgctacttactatgcaaaaagattcagcgtattacgaaacaagtgacagtctagtccttcgaattaatctcactgcagatactaaacttaattttaatgctgttaaaggagcgagtgctcttactgaaaatatgatgatgagacagtttgcagttgctggaccacaagatgatcctgttagtgaacataaatacccatcagtatttctcttaactcctgccttattggaaactgctagtgaggcaactctaaatggtaaggaaatcacagcatctggtattatcggtcacatcaaggatggtgataaaagcaagcatgttgaagtcaaaatggtgaatgaaaatggagacatgctaggaacccctgttattattcaaggtaaagacttgactaatcgaacaaaaccattaatgagtggacgtagagtactttatgccggtaaacaatatgagttccgggctaaattaccacttagtcgttttaacacttggattagggttgaagtggtaacagaagcaggagagaaagcaagtattgttcgtcgcatgttctttgaccaatcagttccagagcttaacacagcagttgctaaacgtgatttgacttctgatactgctcttatccacatcgttgccaaagatgactctctaaaactaaaattatatcaagatgattcattacttgaatctgttgataaaaccggtctttatagttttagaaatggtgtagaaatcactaaagatatgacagtaccactagaatttggagataatattattaagttatctgctgttgacttatcaaattatcgtcgtaatgagacccttcatatctatagaaaccgttttgatgttaaagcaagccaaatgacagctgacaaaggagctaaagtaactgtggatatgttgatgaagcacttagttgttccagaaatggcaggagcttatacattaacaatcgacgaagctccaaacacaaatgaatcaggaatgttaacaaacgctaaagtatcgattcattatgtaaatggtggtgttgataaagttgatgttccgattaaagtagttgacttagaagctattcgtaaagctgaagaagcacataaagctgacgaagcacgtaaagctgaagaagcacgtaaagctgaagaagcacataaagctgaagaagtacgtaaagctgaagaagcacataaagtcgaagaagcacgtaaagctgaagagggacataaaacccaagaagcacctatagttgaagaaggctacaaagttaataacgttcatcaaactgatactacagttaaagcgtctgatttaccaaagactaagacagtttccgcagttcatatggctagaacagacaataaacagataacttcacatcagacacatgttgaaaa

SEQ ID NO: 563 - DNA, 3189 bp, Streptococcus agalactiae
ttgaataataaaggtgtcggtggcgatggtgtccaaatttatcaatactatatcaaaatggacaacaataaaccttacttaagtcccaaagataagactactgtagagaagttagaagatcgctggaaaaaaattactttcaaagttcaggatactggcattggtttgaaagacgtttatcttcaatctgttaagtatgttggtggtggcaataataatttagaccttatcacacctccaggatttaaaaaagaagataaaaaagttgaaaaaccaaaattagaccgtccaccaggaattgatttaccagcaccaacttcaatgagaagttttgattattcaaccccaccgggaactaagccaagcaaacccaaagatagtttatcaactcctccaggtttcccagatttaaacacgccgccggatgaagccaccaaaggatagtaaaaaagacgctattgaagataaatcaggagcaattaaatatgctaagtctcttcaacttagctttgttgatgaccctattttagctagcaaagtaaatggcaaaatattacaagtcgaatctgatggcaaattagtcattcctagaaatgctttgtcagctaatcaatttgatgacactagtcttaaaatttatcgtaataataatcgcaataaagaaattactatcacaacagattattttgcagatacaaaatatgtcaatatcacagcggttgactatttgagcaatactacttttgagcaattagctactggtgaaacagtagattaccatgccattgtattttcaagctttgctgctattaaagacaagggtggtaagatttatgttaacgataaattgcaagaaacttctcgtatagcgcttaaagataaatctgttaagattggtattgaattaccaaatgatgtcagacatattgatagtttatctgttcgtcgtttgaatgaggttaaaactgttgataatatcttgaaaaatgatgaacaagacattaatctcagcaaaacttaccaattaaaatacaacccgacaaatcgtcgtctagagtttactattaataacattaactcaagttcagaaatcatgaccactttcaaagatggaaagatgccagaattggttgaacaaaaagatgtttctttggatataaacgatatggacatgagtaagtttaaaactattcgacttggacgaaaggattctgaatttaagggacaacttattgcaaaaactggaacagttgaattagatatgtttttcaaacaatctcaagacccagcttcaattattaaaaaaatataccttatccaaaatggtgttccaaatgaattgaaaaaatttgactctagttttggtttaactgaaagtcagatagatggatactatatttataaagatgcaattaaccttaaatttaaattaaccagtggtgcaagtcttaaagttgtttataaagggcaagaagatccatatagtcatcagaaagaagatatgactaaaaaaggtgaacagctcagtcattcaactcaagccaatgaaaatacagcaaaagtaacctttgctaatattgactggtcacattatagtaaggttactgtgaatggaaaagaagttggtaaaggtagtgagttacctttaactaaaggatggacaacatttgtattacataaaacagaaaattcattaaatgttaaaagtttgattatggagacgggtagtgtaagtaagaaagttcaacaacttcctttaagtcctagattatctaaaaataagcatatgagggatatgctacttactatgcaaaaagattcagcgtattacgaaacaagtgacagtctagtccttcgaattaatctcactgcagatactaaacttaattttaatgctgttaaaggagcgagtgctcttactgaaaatatgatgatgagacagtttgcagttgctggaccacaagatgatcctgttagtgaacataaatacccatcagtatttctcttaactcctgccttattggaaactgctagtgaggcaactctaaatggtaaggaaatcacagcatctggtattatcggtcacatcaaggatggtgataaaagcaagcatgttgaagtcaaaatggtgaatgaaaatggagacatgctaggaacccctgttattattcaaggtaaagacttgactaatcgaacaaaaccattaatgagtggacgtagagtactttatgccggtaaacaatatgagttccgggctaaattaccacttagtcgttttaacacttggattagggttgaagtggtaacagaagcaggagagaaagcaagtattgttcgtcgcatgttctttgaccaatcagttccagagcttaacacagcagttgctaaacgtgatttgacttctgatactgctcttatccacatcgttgccaaagatgactctctaaaactaaaattatatcaagatgattcattacttgaatctgttgataaaaccggtctttatagttttagaaatggtgtagaaatcactaaagatatgacagtaccactagaatttggagataatattattaagttatctgctgttgacttatcaaattatcgtcgtaatgagacccttcatatctatagaaaccgttttgatgttaaagcaagccaaatgacagctgacaaaggagctaaagtaactgtggatatgttgatgaagcacttagttgttccagaaatggcaggagcttatacattaacaatcgacgaagctccaaacacaaatgaatcaggaatgttaacaaacgctaaagtatcgattcattatgtaaatggtggtgttgataaagttgatgttccgattaaagtagttgacttagaagctattcgtaaagctgaagaagcacataaagctgacgaagcacgtaaagctgaagaagcacgtaaagctgaagaagcacataaagctgaagaagtacgtaaagctgaagaagcacataaagtcgaagaagcacgtaaagctgaagagggacataaaacccaagaagcacctatagttgaagaaggctacaaagttaataacgttcatcaaactgatactacagttaaagcgtctgatttaccaaagactaagacagtttccgcagttcatatggctagaacagacaataaacagataacttcacatcagacacatgt

SEQ ID NO: 564 - DNA, 3192 bp, Streptococcus agalactiae
ttgaataataaaggtgtcggtggcgatggtgtccaaatttatcaatactatatcaaaatggacaacaataaaccttacttaagtcccaaagataagactactgtagagaagttagaagatcgctggaaaaaaattactttcaaagttcaggatactggcattggtttgaaagacgtttatcttcaatctgttaagtatgttggtggtggcaataataatttagaccttatcacacctccaggatttaaaaaagaagataaaaaagttgaaaaaccaaaattagaccgtccaccaggaattgatttaccagcaccaacttcaatgagaagttttgattattcaaccccaccgggaactaagccaagcaaacccaaagatagtttatcaactcctccaggtttcccagatttaaacacgccgccggatgaagccaccaaaggatagtaaaaaagacgctattgaagataaatcaggagcaattaaatatgctaagtctcttcaacttagctttgttgatgaccctattttagctagcaaagtaaatggcaaaatattacaagtcgaatctgatggcaaattagtcattcctagaaatgctttgtcagctaatcaatttgatgacactagtcttaaaatttatcgtaataataatcgcaataaagaaattactatcacaacagattattttgcagatacaaaatatgtcaatatcacagcggttgactatttgagcaatactacttttgagcaattagctactggtgaaacagtagattaccatgccattgtattttcaagctttgctgctattaaagacaagggtggtaagatttatgttaacgataaattgcaagaaacttctcgtatagcgcttaaagataaatctgttaagattggtattgaattaccaaatgatgtcagacatattgatagtttatctgttcgtcgtttgaatgaggttaaaactgttgataatatcttgaaaaatgatgaacaagacattaatctcagcaaaacttaccaattaaaatacaacccgacaaatcgtcgtctagagtttactattaataacattaactcaagttcagaaatcatgaccactttcaaagatggaaagatgccagaattggttgaacaaaaagatgtttctttggatataaacgatatggacatgagtaagtttaaaactattcgacttggacgaaaggattctgaatttaagggacaacttattgcaaaaactggaacagttgaattagatatgtttttcaaacaatctcaagacccagcttcaattattaaaaaaatataccttatccaaaatggtgttccaaatgaattgaaaaaatttgactctagttttggtttaactgaaagtcagatagatggatactatatttataaagatgcaattaaccttaaatttaaattaaccagtggtgcaagtcttaaagttgtttataaagggcaagaagatccatatagtcatcagaaagaagatatgactaaaaaaggtgaacagctcagtcattcaactcaagccaatgaaaatacagcaaaagtaacctttgctaatattgactggtcacattatagtaaggttactgtgaatggaaaagaagttggtaaaggtagtgagttacctttaactaaaggatggacaacatttgtattacataaaacagaaaattcattaaatgttaaaagtttgattatggagacgggtagtgtaagtaagaaagttcaacaacttcctttaagtcctagattatctaaaaataagcatatgagggatatgctacttactatgcaaaaagattcagcgtattacgaaacaagtgacagtctagtccttcgaattaatctcactgcagatactaaacttaattttaatgctgttaaaggagcgagtgctcttactgaaaatatgatgatgagacagtttgcagttgctggaccacaagatgatcctgttagtgaacataaatacccatcagtatttctcttaactcctgccttattggaaactgctagtgaggcaactctaaatggtaaggaaatcacagcatctggtattatcggtcacatcaaggatggtgataaaagcaagcatgttgaagtcaaaatggtgaatgaaaatggagacatgctaggaacccctgttattattcaaggtaaagacttgactaatcgaacaaaaccattaatgagtggacgtagagtactttatgccggtaaacaatatgagttccgggctaaattaccacttagtcgttttaacacttggattagggttgaagtggtaacagaagcaggagagaaagcaagtattgttcgtcgcatgttctttgaccaatcagttccagagcttaacacagcagttgctaaacgtgatttgacttctgatactgctcttatccacatcgttgccaaagatgactctctaaaactaaaattatatcaagatgattcattacttgaatctgttgataaaaccggtctttatagttttagaaatggtgtagaaatcactaaagatatgacagtaccactagaatttggagataatattattaagttatctgctgttgacttatcaaattatcgtcgtaatgagacccttcatatctatagaaaccgttttgatgttaaagcaagccaaatgacagctgacaaaggagctaaagtaactgtggatatgttgatgaagcacttagttgttccagaaatggcaggagcttatacattaacaatcgacgaagctccaaacacaaatgaatcaggaatgttaacaaacgctaaagtatcgattcattatgtaaatggtggtgttgataaagttgatgttccgattaaagtagttgacttagaagctattcgtaaagctgaagaagcacataaagctgacgaagcacgtaaagctgaagaagcacgtaaagctgaagaagcacataaagctgaagaagtacgtaaagctgaagaagcacataaagtcgaagaagcaccgtaaagctgaagagggacataaaacccaagaagcacctatagttgaagaaggctacaaagttaataacgttcatcaaactgatactacagttaaagcgtctgatttaccaaagactaagacagtttccgcagttcatatggctagaacagacaataaacagataacttcacatcagacacatgttg

SEQ ID NO: 565 - DNA, 3165 bp, Streptococcus agalactiae
tggtgtccaaatttatcaatactatatcaaaatggacaacaataaaccttacttaagtcccaaagataagactactgtagagaagttagaagatcgctggaaaaaaattactttcaaagttcaggatactggcattggtttgaaagacgtttatcttcaatctgttaagtatgttggtggtggcaataataatttagaccttatcacacctccaggatttaaaaaagaagataaaaaagttgaaaaaccaaaattagaccgtccaccaggaattgatttaccagcaccaacttcaatgagaagttttgattattcaaccccaccgggaactaagccaagcaaacccaaagatagtttatcaactcctccaggtttcccagatttaaacacgccgccggatgaagcaccaaaggatagtaaaaaagacgctattgaagataaatcaggagcaattaaatatgctaagtctcttcaacttagctttgttgatgaccctattttagctagcaaagtaaatggcaaaatattacaagtcgaatctgatggcaaattagtcattcctagaaatgctttgtcagctaatcaatttgatgacactagtcttaaaatttatcgtaataataatcgcaataaagaaattactatcacaacagattattttgcagatacaaaatatgtcaatatcacagcggttgactatttgagcaatactacttttgagcaattagctactggtgaaacagtagattaccatgccattgtattttcaagctttgctgctattaaagacaagggtggtaagatttatgttaacgataaattgcaagaaacttctcgtatagcgcttaaagataaatctgttaagattggtattgaattaccaaatgatgtcagacatattgatagtttatctgttcgtcgtttgaatgaggttaaaactgttgataatatcttgaaaaatgatgaacaagacattaatctcagcaaaacttaccaattaaaatacaacccgacaaatcgtcgtctagagtttactattaataacattaactcaagttcagaaatcatgaccactttcaaagatggaaagatgccagaattggttgaacaaaaagatgtttctttggatataaacgatatggacatgagtaagtttaaaactattcgacttggacgaaaggattctgaatttaagggacaacttattgcaaaaactggaacagttgaattagatatgtttttcaaacaatctcaagacccagcttcaattattaaaaaaatataccttatccaaaatggtgttccaaatgaattgaaaaaatttgactctagttttggtttaactgaaagtcagatagatggatactatatttataaagatgcaattaaccttaaatttaaattaaccagtggtgcaagtcttaaagttgtttataaagggcaagaagatccatatagtcatcagaaagaagatatgactaaaaraggtgaacagctcagtcattcaactcaagccaatgaaaatacagcaaaagtaacctttgctaatattgactggtcacattatagtaaggttactgtgaatggaaaagaagttggtaaaggtagtgagttacctttaactaaaggatggacaacatttgtattacataaaacagaaaattcattaaatgttaaaagtttgattatggagacgggtagtgtaagtaagaaagttcaacaacttcctttaagtcctagattatctaaaaataagcatatgagggatatgctacttactatgcaaaaagattcagcgtattacgaaacaagtgacagtctagtccttcgaattaatctcactgcagatactaaacttaattttaatgctgttaaaggagcgagtgctcttactgaaaatatgatgatgagacagtttgcagttgctggaccacaagatgatcctgttagtgaacataaatacccatcagtatttctcttaactcctgccttattggaaactgctagtgaggcaactctaaatggtaaggaaatcacagcatctggtattatcggtcacatcaaggatggtgataaaagcaagcatgttgaagtcaaaatggtgaatgaaaatggagacatgctaggaacccctgttattattcaaggtaaagacttgactaatcgaacaaaaccattaatgagtggacgtagagtactttatgccggtaaacaatatgagttccgggctaaattaccacttagtcgttttaacacttggattagggttgaagtggtaacagaagcaggagagaaagcaagtattgttcgtcgcatgttctttgaccaatcagttccagagcttaacacagcagttgctaaacgtgatttgacttctgatactgctcttatccacatcgttgccaaagatgactctctaaaactaaaattatatcaagatgattcattacttgaatctgttgataaaaccggtctttatagttttagaaatggtgtagaaatcactaaagatatgacagtaccactagaatttggagataatattattaagttatctgctgttgacttatcaaattatcgtcgtaatgagacccttcatatctatagaaaccgttttgatgttaaagcaagccaaatgacagctgacaaaggagctaaagtaactgtggatatgttgatgaagcacttagttgttccagaaatggcaggagcttatacattaacaatcgacgaagctccaaacacaaatgaatcaggaatgttaacaaacgctaaagtatcgattcattatgtaaatggtggtgttgataaagttgatgttccgattaaagtagttgacttagaagctattcgtaaagctgaagaagcacataaagctgacgaagcacgtaaagctgaagaagcacgtaaagctgaagaagcacataaagctgaagaagtacgtaaagctgaagaagcacataaagtcgaagaagcaccgtaaagctgaagagggacataaaacccaagaagcacctatagttgaagaaggctacaaggttaataacgttcatcaaactgatactacagttaaagcgtctgatttaccaaagactaagacagtttccgcagttcatatggctagaacagacaataaacagataacttcacatcagacacatgttg

SEQ ID NO: 566 - protein, 1081 aa, Streptococcus agalactiae
LNNKGVGGDGVQIYQYYIKMDNNKPYLSPKDKTTVEKLEDRWKKITFKVQDTGIGLKDVYLQSVKYVGGGNNNLDLITPPGFKKEDKKVEKPKLDRPPGIDLPAPTSMRSFDYSTPPGTKPSKPKDSLSTPPGFPDLNTPPDEAPKDSKKDAIEDKSGAIKYAKSLQLSFVDGPILASKVNGKILQVESDGKLVIPRNALSANQFDDTSLKIYRNNNRNKEITITTDYFADTKYVNITAVDYLSNTTFEQLATGETVDYHAIVFSSFAAIKDKGGKIYVNDKLQETSRIALKDKSVKIGIELPNDVRHIDSLSVRRLNEVKTVDNILKNDEQDINLSKTYQLKYNPTNRRLEFTINNINSSSEIMTTFKDGKMPELVEQKDVSLDINDMDMSKFKTIRLGRKDSEFKGQLIAKTGTVELDMFFKQSQDPASIIKKIYLIQNGVPNELKKFDSSFGLTESQIDGYYIYKDAINLKFKLTSGASLKVVYKGQEDPYSHQKEDMTKKGEQLSHSTQANENTAKVTFANIDWSHYSKVTVNGKEVVKGSELPLTKGWTTFVLHKTENSLNVKSLIMETGSVSKKVQQLPLSPRLSKNKHMRDMLLTMQKDSAYYETSDSLVLRINLTADTKLNFNAVKGASALTENMMMRQFAVAGPQDDPVSEHKYPSVFLLTPALLETASEATLNGKEITASGIIGHIKDGDKSKHVEVKMVNENGDMLGTPVIIQGKDLTNRTKPLMSGRRVLYAGKQYEFRAKLPLSRFNTWIRVEVVTEAGEKASIVRRMFFDQSVPELNTAVAKRDLTSDTALIHIVAKDDSLKLKLYQDDSLLESVDKTGLYSFRNGVEITKDMTVPLEFGDNIIKLSAVDLSNYRRNETLHIYRNRFDVKASQMTADKGAKVTVDMLMKHLVVPEMAGAYTLTIDEAPNTNESGMLTNAKVSIHYVNGGVDKVDVPIKVVDLEAIRKAEEARKAEEARKAEEARKAEEGHKTQEAPIVEEGYKVNNVHQTDTTVKASDLPKTKTVSAVHMARTDNKQITSHQTHVEKQIKNTLPSTGDSKRGYYITGMAIVMLSVLFSLAKKFKSKY

SEQ ID NO: 567 - protein, 1057 aa, Streptococcus agalactiae
LNNKGVGGDGVQIYQYYIKMDNNKPYLSPKDKTTVEKLEDRWKKITFKVQDTGIGLKDVYLQSVKYVGGGNNNLDLITPPGFKKEDKKVEKPKLDRPPGIDLPPPTSMRSFDYSTPPGTKPSKPKDSLSTPPGFPDLNTPPDEALKDSKKDAIEDKSGAIKYAKSLQLSFVDDPILASKVNGKILQVESDGKLVIPRNALSANQFDDTSLKIYRNNNRNKEITITTDYFADTKYVNITAVDYLSNTTFEQLATGETVDYHAIVFSSFAAIKDKGGKIYVNDKLQETSRIALKDKSVKIGIELPNDVRHIDSLSVRRLNEVKTVDNILKNDEQDINLSKTYQLKYNPTNRRLEFTINNINSSSEIMTTFKDGKMPELVEQKDVSLDINDMDMSKFKTIRLGRKDSEFKGQLIAKTGTVELDMFFKQSQDPASIIKKIYLIQNGVPNELKKFDSSFGLTESQIDGYYIYKDAINLKFKLTSGASLKVVYKGQEDPYSHQKEDMTKKGEQLSHSTQANENTAKVTFANIDWSHYSKVTVNGKEVGKGSELPLTKGWTTFVLHKTENSLNVKSLIMETGSVSKKVQQLPLSPRLSKNKHMRDMLLTMQKDSAYYETSDSLVLRINLTADTKLNFNAVKGASALTENMMMRQFAVAGPQDDPVSEHKYPSVFLLTPALLETASEATLNGKEITASGIIGHIKDGDKSKHVEVKMVNENGDMLGTPVIIQGKDLTNRTKPLMSGRRVLYAGKQYEFRAKLPLSRFNTWIRVEVVTEAGEKASIVRRMFFDQSVPELNTAVAKRDLTSDTALIHIVAKDDSLKLKLYQDDSLLESVDKTGLYSFRNGVEITKDMTVPLEFGDNIIKLSAVDLSNYRRNETLHIYRNRFDVKASQMTADKGAKVTVDMLMKHLVVPEMAGAYTLTIDEDPNTNESGMLTNAKVSIHYVNGGVDKVDVPIKVVDLEAIRKAEEAHKADEARKAEEARKAEEARKAEEARKAEEGHKTQEAPIVEEGYKVNNVHQTDTTVKASDLPKTKTVSAVHMARTDNKQITSHQTHVEKQIKN

SEQ ID NO: 568 - protein, 1053 aa, Streptococcus agalactiae
GVQIYQYYIKMDNNKPYLSPKDKTTVEKLEDRWKKITFKVQDTGIGLKDVYLQSVKYVGGGNNNLDLITPPGFKKEDKKVEKPKLDRPPGIDLPAPTSMRSFDYSTPPGTKPSKPKDSLSTPPGFPDLNTPPDEALKDSKKDAIEDKSGAIKYAKSLQLSFVDDPILASKVNGKILQVESDGKLVIPRNALSANQFDDTSLKIYRNNNRNKEITITTDYFADTKYVNITAVDYLSNTTFEQLATGETVDYHAIVFSSFAAIKDKGGKIYVNDKLQETSRIALKDKSVKIGIELPNDVRHIDSLSVRRLNEVKTVDNILKNDEQDINLSKTYQLKYNPTNRRLEFTINNINSSSEIMTTFKDGKMPELVEQKDVSLDINDMDMSKFKTIRLGRKDSEFKGQLIAKTGTVELDMFFKQSQDPASIIKKIYLIQNGVPNELKKFDSSFGLTESQIDGYYIYKDAINLKFKLTSGASLKVVYKGQEDPYSHQKEDMTKKGEQLSHSTQANENTAKVTFANIDWSHYSKVTVNGKEVGKGSELPLTKGWTTFVLHKTENSLNVKSLIMETGSVSKKVQQLPLSPRLSKNKHMRDMLLTMQKDSAYYETSDSLVLRINLTADTKLNFNAVKGASALTENMMMRQFAVAGPQDDPVSEHKYPSVFLLTPALLETASEATLNGKEITASGIIGHIKDGDKSKHVEVKMVNENGDMLGTPVIIQGKDLTNRTKPLMSGRRVLYAGKQYEFRAKLPLSRFNTWIRVEVVTEAGEKASIVRRMFFDQSVPELNTAVAKRDLTSDTALIHIVAKDDSLKLKLYQDDSLLESVDKTGLYSFRNGVEITKDMTVPLEFGDNITKLSAVDLSNYRRNETLHIYRNRFDVKASQMTADKGAKVTVDMLMKHLVVPEMAGAYTLTIDEAPNTNESGMLTNAKVSIHYVNGGVDKVDVPIKVVDLEAIRKAEEAHKADEARKAEEARKADEAHKAEEVRKAEEAHKVEEARKAEEGHKTQEAPIVEEGYKVNNVHQTDTTVKASDLPKTKTVSAVHMARTDNKQITSHQTH

SEQ ID NO: 569 - protein, 1034 aa, Streptococcus agalactiae
LNNKGVGGDGVQIYQYYIKMDNNKPYLSPKDKTTVEKLEDRWKKITFKVQDTGIGLKDVYLQSVKYVGGGNNNLDLITPPGFKKEDKKVEKPKLDRPPGIDLPAPTSMRSFDYSTPPGTKPSKPKDSLSTPPGFPDLNTPPDEAPKDSKKDAIEDKSGAIKYAKSLQLSFVDDPILASKVNGKILQVESDGKLVIPRNALSANQFDDTSLKIYRNNNRNKEITITTDYFADTKYVNITAVDYLSNTTFEQLATGETVDYHAIVFSSFAAIKDKGGKIYVNDKLQETSRIALKDKSVKIGIELPNDVRHIDSLSVRRLNEVKTVDNILKNDEQDINLSKTYQLKYNPTNRRLEFTINNINSSSEIMTTFKDGKMPELVEQKDVSLDINDMDMSKFKTIRLGRKDSEFKGQLIAKTGTVELDMFFKQSQDPASIIKKIYLIQNGVPNELKKFDSSFGLTESQIDGYYIYKDAINLKFKLTSGASLKVVYKGQEDPYSHQKEDMTKKGEQLSHSTQANENTAKVTFANIDWSHYSKVTVNGKEVVKGSELPLTKGWTTFVLHKTENSLNVKSLIMETGSVSKKVQQLPLSPRLSKNKHMRDMLLTMQKDSAYYETSDSLVLRINLTADTKLNFNAVKGASALTENMMMRQFAVAGPQDDPVSEHKYPSVFLLTPALLETASEATLNGKEITASGIIGHIKDGDKSKHVEVKMVNENGDMLGTPVIIQGKDLTNRTKPLMSGRRVLYAGKQYEFRAKLPLSRFNTWIRVEVVTEAGEKASIVRRMFFDQSVPELNTAVAKRDLTSDTALIHIVAKDDSLKLKLYQDDSLLESVDKTGLYSFRNGVEITKDMTVPLEFGDNIIKLSAVDLSNYRRNETLHIYRNRFDVKASQMTADKGAKVTVDMLMKHLVVPEMAGAYTLTIDEAPNTNESGMLTNAKVSIHYVNGGVDKVDVPIKVVDLEAIRKAEEARKAEEARKAEEGHKTQEAPIVEEGYKVNNVHQTDTTVKASDLPKTKTVSAVHMARTDNKQITSHQTHVE

SEQ ID NO: 570 - protein, 1065 aa, Streptococcus agalactiae
  VARIANT 148, 149, 154, 156, 161, 164, 169, 172, 173, 178, 190, 197,203, 206, 207, 209, 211, 215, 216, 217, 220, 241, 249, 255,271, 276, 280, 282, 292, 294, 297, 301, 305, 310, 311, 319,321, 324, 325, 330, 331, 335, 356, 357, 359, 378, 393: Xaa = Any Amino Acid
  VARIANT 395, 405, 407, 418, 434, 446, 451, 453, 458, 468, 472, 474,476, 484, 488, 495, 503, 506, 516, 525, 527, 532, 533, 543,545, 546, 551, 560, 568, 576, 579, 589, 592, 594, 614, 621,627, 629, 631, 634, 641, 656, 659, 660, 662, 678, 679: Xaa = Any Amino Acid
  VARIANT 685, 700, 701, 706, 712, 726, 730, 740, 746, 749, 753, 757,760, 764, 766, 784, 791, 796, 798, 802, 813, 823, 827, 830,831, 836, 838, 845, 856, 859, 864, 871, 872, 878, 882, 884,891, 895, 926, 934, 945, 946, 948, 952, 955, 961, 963: Xaa = Any Amino Acid
  VARIANT 967, 969, 973, 975, 979, 981, 985, 987, 991, 993, 997, 1003,1005, 1009, 1017, 1023, 1024, 1029, 1033, 1036, 1041, 1050,1054, 1064: Xaa = Any Amino Acid
LNNKGVGGDGVQIYQYYIKMDNNKPYLSPKDKTTVEKLEDRWKKITFKVQDTGIGLKDVYLQSVKYVGGGNNNLDLITPPGFKKEDKKVEKPKLDRPPGIDLPAPTSMRSFDYSTPPGTKPSKPKDSLSTPPGFPDLNTPPDEATKGXXKRRYXRXIRSNXICXVSSTXLCXXPYFSXQSKWQNITSRIXWQISHSXKCFVSXSIXXHXSXNLSXXXSQXRNYYHNRLFCRYKICQYHSGXLFEQYYFXAISYWXNSRLPCHCIFKLCCYXRQGWXDLCXRXIARNFSYSAXRXICXDWYXITKXCQTYXXFICSSFEXGXNCXXYLEKXXTRHXSQQNLPIKIQPDKSSSRVYYXXHXLKFRNHDHFQRWKDARIGXTKRCFFGYKRYGHEXVXNYSTWTKGFXIXGTTYCKNWNSXIRYVFQTISRPSFNYXKNIPYPKWCSKXIEKIXLXFWFNXKSDRWILYLXRCNXPXIXINQWCKSXSCLXRARRSIXSSERRYDXKRXTAQSFNSSQXKYSKSNLCXYXLVTLXXGYCEWKRSWXRXXVTFNXRMDNICITXNRKFIKCXKFDYGDGXCKXESSTTSFKSXIIXKXAYEGYATYYAKRFSVLRNKXQSSPSNXSHCRYXTXFXCCXRSECSYXKYDDETVCSCWTTRXSCXXTXIPISISLNSCLIGNCXXGNSKWXGNHSIWYYRSHQGWXXKQACXSQNGEXKWRHARNPCYYSRXRLDXSNKTINEWTXSTLCRXTIXVPGXITTXSFXHLDXGXSGNRSRRESKYCSSHVLXPISSRAXHSSCXTXFDFXYCSYPHRCQRXLSKTKIISRXFITXICXXNRSLXFXKWCRNHXRYDSTTRIWRXYYXVICCXLIKLSSXXDPSYLXKPFXCXSKPNDSXQRSXSNCGYVDEALSCSRNGRSLYINNRRSSKHKXIRNVNKRXSIDSLCKWWCXXSXCSDXSSXLRSYSXSXRSTXSXRSTXSXRSTXSXRSTXSXRSTXSXRSTXSRRSTXSXRGTXNPRSTYSXRRLQSXXRSSNXYYSXSVXFTKDXDSFRSSYGXNRQXTDNFTSDTCXK

SEQ ID NO: 571 - protein, 1063 aa, Streptococcus agalactiae
  VARIANT 148, 149, 154, 156, 161, 164, 169, 172, 173, 178, 190, 197,203, 206, 207, 209, 211, 215, 216, 217, 220, 241, 249, 255,271, 276, 280, 282, 292, 294, 297, 301, 305, 310, 311, 319,321, 324, 325, 330, 331, 335, 356, 357, 359, 378, 393: Xaa = Any Amino Acid
  VARIANT 395, 405, 407, 418, 434, 446, 451, 453, 458, 468, 472, 474,476, 484, 488, 495, 503, 506, 516, 525, 527, 532, 533, 543,545, 546, 551, 560, 568, 576, 579, 589, 592, 594, 614, 621,627, 629, 631, 634, 641, 656, 659, 660, 662, 678, 679: Xaa = Any Amino Acid
  VARIANT 685, 700, 701, 706, 712, 726, 730, 740, 746, 749, 753, 757,760, 764, 766, 784, 791, 796, 798, 802, 813, 823, 827, 830,831, 836, 838, 845, 856, 859, 864, 871, 872, 878, 882, 884,891, 895, 926, 934, 945, 946, 948, 952, 955, 961, 963: Xaa = Any Amino Acid
  VARIANT 967, 969, 973, 975, 979, 981, 985, 987, 991, 993, 997, 1003,1005, 1009, 1017, 1023, 1024, 1029, 1033, 1036, 1041, 1050,1054: Xaa = Any Amino Acid
LNNKGVGGDGVQIYQYYIKMDNNKPYLSPKDKTTVEKLEDRWKKITFKVQDTGIGLKDVYLQSVKYVGGGNNNLDLITPPGFKKEDKKVEKPKLDRPPGIDLPAPTSMRSFDYSTPPGTKPSKPKDSLSTPPGFPDLNTPPDEATKGXXKRRYXRXIRSNXICXVSSTXLCXXPYFSXQSKWQNITSRIXWQISHSXKCFVSXSIXXHXSXNLSXXXSQXRNYYHNRLFCRYKICQYHSGXLFEQYYFXAISYWXNSRLPCHCIFKLCCYXRQGWXDLCXRXIARNFSYSAXRXICXDWYXITKXCQTYXXFICSSFEXGXNCXXYLEKXXTRHXSQQNLPIKIQPDKSSSRVYYXXHXLKFRNHDHFQRWKDARIGXTKRCFFGYKRYGHEXVXNYSTWTKGFXIXGTTYCKNWNSXIRYVFQTISRPSFNYXKNIPYPKWCSKXIEKIXLXFWFNXKSDRWILYLXRCNXPXIXINQWCKSXSCLXRARRSIXSSERRYDXKRXTAQSFNSSQXKYSKSNLCXYXLVTLXXGYCEWKRSWXRXXVTFNXRMDNICITXNRKFIKCXKFDYGDGXCKXESSTTSFKSXIIXKXAYEGYATYYAKRFSVLRNKXQSSPSNXSHCRYXTXFXCCXRSECSYXKYDDETVCSCWTTRXSCXXTXIPISISLNSCLIGNCXXGNSKWXGNHSIWYYRSHQGWXXKQACXSQNGEXKWRHARNPCYYSRXRLDXSNKTINEWTXSTLCRXTIXVPGXITTXSFXHLDXGXSGNRSRRESKYCSSHVLXPISSRAXHSSCXTXFDFXYCSYPHRCQRXLSKTKIISRXFITXICXXNRSLXFXKWCRNHXRYDSTTRIWRXYYXVICCXLIKLSSXXDPSYLXKPFXCXSKPNDSXQRSXSNCGYVDEALSCSRNGRSLYINNRRSSKHKXIRNVNKRXSIDSLCKWWCXXSXCSDXSSXLRSYSXSXRSTXSXRSTXSXRSTXSXRSTXSXRSTXSXRSTXSRRSTXSXRGTXNPRSTYSXRRLQSXXRSSNXYYSXSVXFTKDXDSFRSSYGXNRQXTDNFTSDTC

SEQ ID NO: 572 - protein, 1064 aa, Streptococcus agalactiae
  VARIANT 148, 149, 154, 156, 161, 164, 169, 172, 173, 178, 190, 197,203, 206, 207, 209, 211, 215, 216, 217, 220, 241, 249, 255,271, 276, 280, 282, 292, 294, 297, 301, 305, 310, 311, 319,321, 324, 325, 330, 331, 335, 356, 357, 359, 378, 393: Xaa = Any Amino Acid
  VARIANT 395, 405, 407, 418, 434, 446, 451, 453, 458, 468, 472, 474,476, 484, 488, 495, 503, 506, 516, 525, 527, 532, 533, 543,545, 546, 551, 560, 568, 576, 579, 589, 592, 594, 614, 621,627, 629, 631, 634, 641, 656, 659, 660, 662, 678, 679: Xaa = Any Amino Acid
  VARIANT 685, 700, 701, 706, 712, 726, 730, 740, 746, 749, 753, 757,760, 764, 766, 784, 791, 796, 798, 802, 813, 823, 827, 830,831, 836, 838, 845, 856, 859, 864, 871, 872, 878, 882, 884,891, 895, 926, 934, 945, 946, 948, 952, 955, 961, 963: Xaa = Any Amino Acid
  VARIANT 967, 969, 973, 975, 979, 981, 985, 987, 991, 993, 997, 1016,1057: Xaa = Any Amino Acid
LNNKGVGGDGVQIYQYYIKMDNNKPYLSPKDKTTVEKLEDRWKKITFKVQDTGIGLKDVYLQSVKYVGGGNNNLDLITPPGFKKEDKKVEKPKLDRPPGIDLPAPTSMRSFDYSTPPGTKPSKPKDSLSTPPGFPDLNTPPDEATKGXXKRRYXRXIRSNXICXVSSTXLCXXPYFSXQSKWQNITSRIXWQISHSXKCFVSXSIXXHXSXNLSXXXSQXRNYYHNRLFCRYKICQYHSGXLFEQYYFXAISYWXNSRLPCHCIFKLCCYXRQGWXDLCXRXIARNFSYSAXRXICXDWYXITKXCQTYXXFICSSFEXGXNCXXYLEKXXTRHXSQQNLPIKIQPDKSSSRVYYXXHXLKFRNHDHFQRWKDARIGXTKRCFFGYKRYGHEXVXNYSTWTKGFXIXGTTYCKNWNSXIRYVFQTISRPSFNYXKNIPYPKWCSKXIEKIXLXFWFNXKSDRWILYLXRCNXPXIXINQWCKSXSCLXRARRSIXSSERRYDXKRXTAQSFNSSQXKYSKSNLCXYXLVTLXXGYCEWKRSWXRXXVTFNXRMDNICITXNRKFIKCXKFDYGDGXCKXESSTTSFKSXIIXKXAYEGYATYYAKRFSVLRNKXQSSPSNXSHCRYXTXFXCCXRSECSYXKYDDETVCSCWTTRXSCXXTXIPISISLNSCLIGNCXXGNSKWXGNHSIWYYRSHQGWXXKQACXSQNGEXKWRHARNPCYYSRXRLDXSNKTINEWTXSTLCRXTIXVPGXITTXSFXHLDXGXSGNRSRRESKYCSSHVLXPISSRAXHSSCXTXFDFXYCSYPHRCQRXLSKTKIISRXFITXICXXNRSLXFXKWCRNHXRYDSTTRIWRXYYXVICCXLIKLSSXXDPSYLXKPFXCXSKPNDSXQRSXSNCGYVDEALSCSRNGRSLYINNRRSSKHKXIRNVNKRXSIDSLCKWWCXXSXCSDXSSXLRSYSXSXRSTXSXRSTXSXRSTXSXRSTXSXRSTXSXRSTXSRRSTVKLKRDIKPKKHLXLKKATKLITFIKLILQLKRLIYQRLRQFPQFIWLEQTINRXLHIRHML

SEQ ID NO: 573 - protein, 1054 aa, Streptococcus agalactiae
  VARIANT 495, 994, 996, 1000, 1008, 1014, 1015, 1020, 1024, 1027,1032, 1041, 1045: Xaa = Any Amino Acid
GVQIYQYYIKMDNNKPYLSPKDKTTVEKLEDRWKKITFKVQDTGIGLKDVYLQSVKYVGGGNNNLDLITPPGFKKEDKKVEKPKLDRPPGIDLPAPTSMRSFDYSTPPGTKPSKPKDSLSTPPGFPDLNTPPDEAPKDSKKDAIEDKSGAIKYAKSLQLSFVDDPILASKVNGKILQVESDGKLVIPRNALSANQFDDTSLKIYRNNNRNKEITITTDYFADTKYVNITAVDYLSNTTFEQLATGETVDYHAIVFSSFAAIKDKGGKIYVNDKLQETSRIALKDKSVKIGIELPNDVRHIDSLSVRRLNEVKTVDNILKNDEQDINLSKTYQLKYNPTNRRLEFTINNINSSSEIMTTFKDGKMPELVEQKDVSLDINDMDMSKFKTIRLGRKDSEFKGQLIAKTGTVELDMFFKQSQDPASIIKKIYLIQNGVPNELKKFDSSFGLTESQIDGYYIYKDAINLKFKLTSGASLKVVYKGQEDPYSHQKEDMTKXGEQLSHSTQANENTAKVTFANIDWSHYSKVTVNGKEVGKGSELPLTKGWTTFVLHKTENSLNVKSLIMETGSVSKKVQQLPLSPRLSKNKHMRDMLLTMQKDSAYYETSDSLVLRINLTADTKLNFNAVKGASALTENMMMRQFAVAGPQDDPVSEHKYPSVFLLTPALLETASEATLNGKEITASGIIGHIKDGDKSKHVEVKMVNENGDMLGTPVIIQGKDLTNRTKPLMSGRRVLYAGKQYEFRAKLPLSRFNTWIRVEVVTEAGEKASIVRRMFFDQSVPELNTAVAKRDLTSDTALIHIVAKDDSLKLKLYQDDSLLESVDKTGLYSFRNGVEITKDMTVPLEFGDNIIKLSAVDLSNYRRNETLHIYRNRFDVKASQMTADKGAKVTVDMLMKHLVVPEMAGAYTLTIDEAPNTNESGMLTNAKVSIHYVNGGVDKVDVPIKVVDLEAIRKAEEAHKADEARKAEEARKAEEAHKAEEVRKAEEAHKVEEAPXSXRGTXNPRSTYSXRRLQGXXRSSNXYYSXSVXFTKDXDSFRSSYGXNRQXTDNFTSDTC

SEQ ID NO: 574 - DNA, 1251 bp, Streptococcus agalactiae
agcgatacctttaattttgatattgaccaaattgcagacaatgctatcactaaaacagataaaacaacagaaattatttccaaccagacaacaagccaaactgggcaaattgccttttttgaaaaactaacaccagcacaaaagtctgctatctctgaaaaaacaccagctttggtagatacttttgtcggcgatcaaaatgcgctccttgattttggacaatccgcagtagaaggcgttaataccactgttaatcatatcttgtctgagcagaaaaaaattcaaattcctcaagttgatgatttactaaaaaatgctaatcgcgaactaaatggatttattgccaaatataaagatgctactccggcagaattagagaaaaaaccaaacttgattcaaaaattattcaaacaaagcaagacctcgctacaggaattttattttgactcacaaaacatcgagcaaaaaatggatatgatggcagcgaatgttgtcaaacaagaagatactttggcaagaaatatcgtctctgctgaaatgctcattgaagataatactaaatctattgaaaatttggttggagttattgcttttattgaatcgagtcaagccgaggctgctaatcgtgcaagccacttacaacaagaaattctagcattagatagccaaacgtccgagtatcaaattaaaagtaaccaattagctcgaatgactgaagttatcaataccctcgaacagcaacatactgaatatgtcagccgtctctacgttgcatgggcaacaacaccacagatgcgaaacttggtcaaagtatcgtcagatatgcgtcagaaacttggcatgttacgtcgaaataccattccaacaatgaaactctcaatcgctcagttaggcatgatgcaacaatctgtcaaatccggtgtcactgctgatgctattgtcaacgctaataatgcagcattgcagatgctggctgaaactagtaaagaagcgattccgatgttagagaagaccgcacaaagccccactgtttctattaaatctgtcactgcattagctgaaagcttagtggctcaaaataatggtattatcgctgccatagacaaaggacgtaaggaacgtgcccaattggaatctgctgttattaaatcggctgaaacaatcaatgattctgtcaaaattcgtgataaaaaaatagttgaagccttactcaacgaaggtaaatctacccaagaaaaagttgatgagtct

SEQ ID NO: 575 - DNA, 1251 bp, Streptococcus agalactiae
agcgatacctttaattttgatattgaccaaattgcagacaatgctatcactaaaacagataaaacaacagaaattatttccaaccagacaacaagccaaactgggcaaattgccttttttgaaaaactaacaccagcacaaaagtctgctatctctgaaaaaacaccagctttggtagatacttttgtcggtgaccaaaatgcgctccttgattttggacaatccgcagtagaaggcgttaataccactgttaatcatatcttgtctgagcagaaaaaaattcaaattcctcaagttgatgatttactaaaaaatgctaatcgcgaactaaatggatttattgccaaatataaagatgctactccggcagaattagagaaaaaaccaaacttgattcaaaaattattcaaacaaagcaagacctcgctacaggaattttattttgactcacaaaacatcgagcaaaaaatggatatgatggcagcgaatgttgtcaaacaagaagatactttggcaagaaatatcgtctctgctgaaatgctcattgaagataatactaaatctattgaaaatttggttggagttawtgcttttattgaatcgagtcaagccgaggctgccaatcgtgcaagccacttacaacaagaaattctagcattagatagccaaacgtccgagtatcaaattaaaagtaaccaattagctcgaatgactgaagttatcaataccctcgaacagcaacatactgaatatgtcagccgtctctacgttgcatgggcaacaacaccacagatgcgaaacttggtcaaagtatcgtcagatatgcgtcaaaaacttggcatgttacgtcgaaataccattccaacaatgaaactctcaatcgctcagttaggcatgatgcaacaatctgtcaaatccggtgtcactgctgatgctattgtcaacgctaataatgcagcattgcagatgctggctgaaactagtaaagaagcgattccgatgttagagaagaccgcacaaagccccactgtttctattaaatctgtcactgcattagctgaaagcttagtggctcaaaataatggtattatcgctgccatagacaaaggacgtaaagaacgtgcccaattagaatctgctgttattaaatcggctgaaacaatcaatgattctgtcaaaattcgtgataaaaaaatagttgaagccttactcaacgaaggtaaatctacccaagaaaaagttgatgagtct

SEQ ID NO: 576 - DNA, 1251 bp, Streptococcus agalactiae
agcgatacctttaattttgatattgaccaaattgcagacaatgctatcactaaaacagataaaacaacagaaattatttccaaccagacaacaagccaaactgggcaaattgccttttttgaaaaactaacaccagcacaaaagtctgctatctctgaaaaaacaccagctttggtagatacttttgtcggtgaccaaaatgcgctccttgattttggacaatccgcagtagaaggcgttaataccactgttaatcatatcttgtctgagcagaaaaaaattcaaattcctcaagttgatgatttactaaaaaatgctaatcgcgaactaaatggatttattgccaaatataaagatgctactccggcagaattagagaaaaaaccaaacttgattcaaaaattattcaaacaaagcaagacctcgctacaggaattttattttgactcacaaaacatcgagcaaaaaatggatatgatggcagcgaatgttgtcaaacaagaagatactttggcaagaaatatcgtctctgctgaaatgctcattgaagataatactaaatctattgaaaatttggttggagttattgcttttattgaatcgagtcaagccgaggctgccaatcgtgcaagccacttacaacaagaaattctagcattagatagccaaacgtccgagtatcaaattaaaagtaaccaattagctcgaatgactgaagttatcaataccctcgaacagcaacatactgaatatgtcagccgtctctacgttgcatgggcaacaacaccacagatgcgaaacttggtcaaagtatcgtcagatatgcgtcaaaaacttggcatgttacgtcgaaataccattccaacaatgaaactctcaatcgctcagttaggcatgatgcaacaatctgtcaaatccggtgtcactgctgatgctattgtcaacgctaataatgcagcattgcagatgctggctgaaactagtaaagaagcgattccgatgttagagaagaccgcacaaagccccactgtttctattaaatctgtcactgcattatctgaaagcttagtggctcaaaataatggtattatcgctgccatagacaaaggacgtaaagaacgtgcccaattagaatctgctgttattaaatcggctgaaacaatcaatgattctgtcaaaattcgtgataaaaaaatagttgaagccttactcaacgaaggtaaatctacccaagaaaaagttgatgagtct

SEQ ID NO: 577 - DNA, 1237 bp, Streptococcus agalactiae
ttttgatattgaccaaattgcagacaatgctatcactaaaacagataaaacaacagaaattatttccaaccagacaacaagccaaactgggcaaattgccttttttgaaaaactaacaccagcacaaaagtctgctatctctgaaaaaacaccagctttggtagatacttttgtcggcgatcaaaatgcgctccttgattttggacaatccgcagtagaaggcgttaataccactgttaatcatatcttgtctgagcagaaaaaaattcaaattcctcaagttgatgatttactaaaaaatgctaatcgcgaactaaatggatttattgccaaatataaagatgctactccggcagaattagagaaaaaaccaaacttgattcaaaaattattcaaacaaagcaagacctcgctacaggaattttattttgactcacaaaacatcgagcaaaaaatggatatgatggcagcgaatgttgtcaaacaagaagatactttggcaagaaatatcgtctctgctgaaatgctcattgaagataatactaaatctattgaaaatttggttggagttattgcttttattgaatcgagtcaagccgaggctgctaatcgtgcaagccacttacaacaagaaattctagcattagatagccaaacgtccgagtatcaaattaaaagtaaccaattagctcgaatgactgaagttatcaataccctcgaacagcaacatcctgaatatgtcagccgtctctacgttgcatgggcaacaacaccacagatgcgaaacttggtcaaagtatcgtcagatatgcgtcagaaacttggcatgttacgtcgaaataccattccaacaatgaaactctcaatcgctcagttaggcatgatgcaacaatctgtcaaatccggtgtcactgctgatgctattgtcaacgctaataatgcagcattgcagatgctggctgaaactagtaaagaagcgattccgatgttagagaagaccgcacaaagccccactgtttctattaaatctgtcactgcattagctgaaagcttagtggctcaaaataatggtattatcgctgccatagacaaaggacgtaaggaacgtgcccaattggaatctgctgttattaaatcggctgaaacaatcaatgattctgtcaaaattcgtgataaaaaaatagttgaagccttactcaacgaaggtaaatctacccaagaaaaagttgatgagtct

SEQ ID NO: 578 - DNA, 1240 bp, Streptococcus agalactiae
agcgatacctttaattttgatattgaccaaattgcagacaatgctatcactaaaacagataaaacaacagaaattatttccaaccagacaacaagccaaactgggcaaattgccttttttgaaaaactaacaccagcacaaaagtctgctatctctgaaaaaacaccagctttggtagatacttttgtcggtgaccaaaatgcgctccttgattttggacaatccgcagtagaaggcgttaatactactgttaatcatatcttgtctgagcagaaaaaaattcaaattcctcaagttgatgatttactaaaaaatgctaatcgcgaactaaatggatttattgccaaatataaagatgctactccggcagaattagagaaaaaaccaaacttgattcaaaaattattcaaacaaagcaagacctcgctacaggaattttattttgactcacaaaacatcgagcaaaaaatggatatgatggcagcaaatgttgtcaaacaagaagatactttggcaagaaatatcgtctctgctgaaatgctcattgaagataatactaaatctattgaaaatttggttggagttattgcttttattgaatcgagtcaagccgaggctgccaatcgtgcaagccacttacaacaagaaattctagcattagatagccaaacgtccgaatatcaaattaaaagtaaccaattagcccgaatgactgaagttatcaataccctcgaacagcaacatacggaatatgtcagccgtctctacgttgcatgggcaacaacaccacagatgcgaaacttggtcaaagtatcgtcagatatgcgtcagaaacttggtatgttacgtcgaaataccattccaacaatgaaactctcaatcgctcagttaggcatgatgcaacaatctgtcaaatccggtgtcactgctgatgctattgtcaacgctaataatgcagcattgcaaatgctggctgaaactagtaaagaagcgattccgatgttagagaagaccgcacaaagccccactgtttctattaaatctgtcactgcattagctgaaagcttagtggctcaaaataatggtattatcgctgccatagacaaaggacgtaaggaacgtgcccaattagaatctgctgttattaaatcggctgaaacaatcaatgattctgtcaaaattcgtgataaaaaaatagttgaagccttactcaacgaaggtaaatctacccaagaaaaag

SEQ ID NO: 579 - DNA, 1202 bp, Streptococcus agalactiae
ctaaaacagataaaacaacagaaattatttccaaccagacaacaagccaaactgggcaaattgccttttttgaaaaactaacaccagcacaaaagtctgctwtctctgaaaaaacaccagctttggtagatacttttgtcggtgaccaaaatgcgctccttgattttggacaatccgcagtagaaggcgttaatactactgttaatcatatcttgtctgagcagaaaaaaattcaaattcctcaagttgatgatttactaaaaaatgctaatcgcgaactaaatggatttattgccaaatataaagatgctactccggcagaattagagaaaaaaccaaacttgattcaaaaattattcaaacaaagcaagacctcgctacaggaattttattttgactcacaaaacatcgagcaaaaaatggatatgatggcagcaaatgttgtcaaacaagaagatactttggcaagaaatatcgtctctgctgaaatgctcattgaagataatactaaatctattgaaaatttggttggagttattgcttttattgaatcgagtcaagccgaggctgccaatcgtgcaagccacttacaacaagaaattctagcattagatagccaaacgtccgaatatcaaattaaaagtaaccaattagcccgaatgactgaagttatcaataccctcgaacagcaacatacggaatatgtcagccgtctctacgttgcatgggcaacaacaccacagatgcgaaacttggtcaaagtatcgtcagatatgcgtcagaaacttggtatgttacgtcgaaataccattccaacaatgaaactctcaatcgctcagttaggcatgatgcaacaatctgtcaaatccggtgtcactgctgatgctattgtcaacgctaataatgcagcattgcaaatgctggctgaaactagtaaagaagcgattccgatgttagagaagaccgcacaaagccccactgtttctattaaatctgtcactgcattagctgaaagcttagtggctcaaaataatggtattatcgctgccatagacaaaggacgtaaggaacgtgcccaattagaatctgctgttattaaatcggctgaaacaatcaatgattctgtcaaaattcgtgataaaaaaatagttgaagccttactcaacgaaggtaaatctacccaagaaaaagttgatgagtct

SEQ ID NO: 580 - DNA, 1237 bp, Streptococcus agalactiae
ttttgatattgaccaaattgcagacaatgctatcactaaaacagataaaacaacagaaattatttccaaccagacaacaagccaaactgggcaaattgccttttttgaaaaactaacaccagcacaaaagtctgctatctctgaaaaaacaccagctttggtagatacttttgtcggtgaccaaaatgcgctccttgattttggacaatccgcagtagaaggcgttaatactactgttaatcatatcttgtctgagcagaaaaaaattcaaattcctcaagttgatgatttactaaaaaatgctaatcgcgaactaaatggatttattgccaaatataaagatgctactccggcagaattagagaaaaaaccaaacttgattcaaaaattattcaaacaaagcaagacctcgctacaggaattttattttgactcacaaaacatcgagcaaaaaatggatatgatggcagcaaatgttgtcaaacaagaagatactttggcaagaaatatcgtctctgctgaaatgctcattgaagataatactaaatctattgaaaatttggttggagttattgcttttattgaatcgagtcaagccgaggctgccaatcgtgcaagccacttacaacaagaaattctagcattagatagccaaacgtccgaatatcaaattaaaagtaaccaattagcccgaatgactgaagttatcaataccctcgaacagcaacatacggaatatgtcagccgtctctacgttgcatgggcaacaacaccacagatgcgaaacttggtcaaagtatcgtcagatatgcgtcagaaacttggtatgttacgtcgaaataccattccaacaatgaaactctcaatcgctcagttaggcatgatgcaacaatctgtcaaatccggtgtcactgctgatgctattgtcaacgctaataatgcagcattgcaaatgctggctgaaactagtaaagaagcgattccgatgttagagaagaccgcacaaagccccactgtttctattaaatctgtcactgcattagctgaaagcttagtggctcaaaataatggtattatcgctgccatagacaaaggacgtaaggaacgtgcccaattagaatctgctgttattaaatcggctgaaacaatcaatgattctgtcaaaattcgtgataaaaaaatagttgaagccttactcaacgaaggtaaatctacccaagaaaaagttgatgagtct

SEQ ID NO: 581 - DNA, 1237 bp, Streptococcus agalactiae
ttttgatattgaccaaattgcagacaatgctatcactaaaacagataaaacaacagaaattatttccaaccagacaacaagccaaactgggcaaattgccttttttgaaaaactaacaccagcacaaaagtctgctatctctgaaaaaacaccagctttggtagatacttttgtcggcgatcaaaatgcgctccttgattttggacaatccgcagtagaaggcgttaataccactgttaatcatatcttgtctgagcagaaaaaaattcaaattcctcaagttgatgatttactaaaaaatgctaatcgcgaactaaatggatttattgccaaatataaagatgctactccggcagaattagagaaaaaaccaaacttgattcaaaaattattcaaacaaagcaagacctcgctacaggaattttattttgactcacaaaacatcgagcaaaaaatggatatgatggcagcgaatgttgtcaaacaagaagatactttggcaagaaatatcgtctctgctgaaatgctcattgaagataatactaaatctattgaaaatttggttggagttattgcttttattgaatcgagtcaagccgaggctgctaatcgtgcaagccacttacaacaagaaattctagcattagatagccaaacgtccgagtatcaaattaaaagtaaccaattagctcgaatgactgaagttatcaataccctcgaacagcaacatactgaatatgtcagccgtctctacgttgcatgggcaacaacaccacagatgcgaaacttggtcaaagtatcgtcagatatgcgtcagaaacttggcatgttacgtcgaaataccattccaacaatgaaactctcaatcgctcagttaggcatgatgcaacaatctgtcaaatccggtgtcactgctgatgctattgtcaacgctaataatgcagcattgcagatgctggctgaaactagtaaagaagcgattccgatgttagagaagaccgcacaaagccccactgtttctattaaatctgtcactgcattagctgaaagcttagtggctcaaaataatggtattatcgctgccatagacaaaggacgtaaggaacgtgcccaattggaatctgctgttattaaatcggctgaaacaatcaatgattctgtcaaaattcgtgataaaaaaatagttgaagccttactcaacgaaggtaaatctacccaagaaaaagttgatgagtct

SEQ ID NO: 582 - DNA, 1218 bp, Streptococcus agalactiae
gcagacaatgctatcactaaaacagataaaacaacagaaattatttccaaccagacaacaagccaaactgggcaaattgccttttttgaaaaactaacaccagcacaaaagtctgctatctctgaaaaaacaccagctttggtagatacttttgtcggtgaccaaaatgcgctccttgattttggacaatccgcagtagaaggcgttaataccactgttaatcatatcttgtctgagcagaaaaaaattcaaattcctcaagttgatgatttactaaaaaatgctaatcgcgaactaaatggatttattgccaaatataaagatgctactccggcagaattagagaaaaaaccaaacttgatccaaaaattattcaaacaaagcaagacctcactacaggaattttattttgactcacaaaacatcgagcaaaaaatggatatgatggcagcaaatgttgtcaaacaagaagatactttggcaagaaatatcgtctctgctgaaatgctcattgaagataatactaaatctattgaaaatttggttggagttattgcttttattgaatcgagtcaagccgaggctgccaatcgtgcaagccacttacaacaagaaattctagcattagatagccaaacgtccgagtatcaaattaaaagtaaccaattagctcgaatgactgaagttatcaataccctcgaacagcaacatactgaatatgtcagccgtctctacgttgcatgggcaacaacaccacagatgcgaaacttggtcaaagtatcgtcagatatgcgtcaaaaacttggcatgttacgtcgaaataccattccaacaatgaaactctcaatcgctcagttaggcatgatgcaacaatctgtcaaatccggtgtcactgctgatgctattgtcaacgctaataatgcagcattgcagatgctggctgaaactagtaaagaagcgattccgatgttagagaagaccgcacaaagccccactgtttctattaaatctgtcactgcattagctgaaagcttagtggctcaaaataatggtattatcgctgccatagacaaaggacgtaaggaacgtgcccaattagaatctgctgttattaaatcggctgaaacaatcaatgattctgtcaaaattcgtgataaaaaaatagttgaagccttactcaacgaaggtaaatctacccaagaaaaagttgatgagtct

SEQ ID NO: 583 - DNA, 1251 bp, Streptococcus agalactiae
agcgatacctttaattttgatattgaccaaattgcagacaatgctatcactaaaacagataaaacaacagaaattatttccaaccagacaacaagccaaactgggcaaattgccttttttgaaaaactaacaccagcacaaaagtctgctatctctgaaaaaacaccagctttggtagatacttttgtcggtgaccaaaatgcgctccttgattttggacaatccgcagtagaaggcgttaataccactgttaatcatatcttgtctgagcagaaaaaaattcaaattcctcaagttgatgatttactaaaaaatgctaatcgcgaactaaatggatttattgccaaatataaagatgctactccggcagaattagagaaaaaaccaaacttgattcaaaaattattcaaacaaagcaagacctcgctacaggaattttattttgactcacaaaacatcgagcaaaaaatggatatgatggcagcgaatgttgtcaaacaagaagatactttggcaagaaatatcgtctctgctgaaatgctcattgaagataatactaaatctattgaaaatttggttggagttattgcttttattgaatcgagtcaagccgaggctgccaatcgtgcaagccacttacaacaagaaattctagcattagatagccaaacgtccgagtatcaaattaaaagtaaccaattagctcgaatgactgaagttatcaataccctcgaacagcaacatactgaatatgtcagccgtctctacgttgcatgggcaacaacaccacagatgcgaaacttggtcaaagtatcgtcagatatgcgtcaaaaacttggcatgttacgtcgaaataccattccaacaatgaaactctcaatcgctcagttaggcatgatgcaacaatctgtcaaatccggtgtcactgctgatgctattgtcaacgctaataatgcagcattgcagatgctggctgaaactagtaaagaagcgattccgatgttagagaagaccgcacaaagccccactgtttctattaaatctgtcactgcattagctgaaagcttagtggctcaaaataatggtattatcgctgccatagacaaaggacgtaaggaacgtgcccaattagaatctgctgttattaaatcggctgaaacaatcaatgattctgtcaaaattcgtgataaaaaaatagttgaagccttactcaacgaaggtaaatctacccaagaaaaagttgatgagtct

SEQ ID NO: 584 - DNA, 1251 bp, Streptococcus agalactiae
agcgatacctttaattttgatattgaccaaattgcagacaatgctatcactaaaacagataaaacaacagaaattatttccaaccagacaacaagccaaactgggcaaattgccttttttgaaaaactaacaccagcacaaaagtctgctatctctgaaaaaacaccagctttggtagatacttttgtcggcgatcaaaatgcgctccttgattttggacaatccgcagtagaaggcgttaataccactgttaatcatatcttgtctgagcagaaaaaaattcaaattcctcaagttgatgatttactaaaaaatgctaatcgcgaactaaatggatttattgccaaatataaagatgctactccggcagaattagagaaaaaaccaaacttgattcaaaaattattcaaacaaagcaagacctcgctacaggaattttattttgactcacaaaacatcgagcaaaaaatggatatgatggcagcgaatgttgtcaaacaagaagatactttggcaagaaatatcgtctctgctgaaatgctcattgaagataatactaaatctattgaaaatttggttggagttattgcttttattgaatcgagtcaagccgaggctgctaatcgtgcaagccacttacaacaagaaattctagcattagatagccaaacgtccgagtatcaaattaaaagtaaccaattagctcgaatgactgaagttatcaataccctcgaacagcaacatcctgaatatgtcagccgtctctacgttgcatgggcaacaacaccacagatgcgaaacttggtcaaagtatcgtcagatatgcgtcagaaacttggcatgttacgtcgaaataccattccaacaatgaaactctcaatcgctcagttaggcatgatgcaacaatctgtcaaatccggtgtcactgctgatgctattgtcaacgctaataatgcagcattgcagatgctggctgaaactagtaaagaagcgattccgatgttagagaagaccgcacaaagccccactgtttctattaaatctgtcactgcattagctgaaagcttagtggctcaaaataatggtattatcgctgccatagacaaaggacgtaaggaacgtgcccaattggaatctgctgttattaaatcggctgaaacaatcaatgattctgtcaaaattcgtgataaaaaaatagttgaagccttactcaacgaaggtaaatctacccaagaaaaagttgatgagtct

SEQ ID NO: 585 - protein, 417 aa, Streptococcus agalactiae
SDTFNFDIDQIADNAITKTDKTTEIISNQTTSQTGQIAFFEKLTPAQKSAISEKTPALVDTFVGDQNALLDFGQSAVEGVNTTVNHILSEQKKIQIPQVDDLLKNANRELNGFIAKYKDATPAELEKKPNLIQKLFKQSKTSLQEFYFDSQNIEQKMDMMAANVVKQEDTLARNIVSAEMLIEDNTKSIENLVGVIAFIESSQAEAANRASHLQQEILALDSQTSEYQIKSNQLARMTEVINTLEQQHTEYVSRLYVAWATTPQMRNLVKVSSDMRQKLGMLRRNTIPTMKLSIAQLGMMQQSVKSGVTADAIVNANNAALQMLAETSKEAIPMLEKTAQSPTVSIKSVTALAESLVAQNNGIIAAIDKGRKERAQLESAVIKSAETINDSVKIRDKKIVEALLNEGKSTQEKVDES

SEQ ID NO: 586 - protein, 417 aa, Streptococcus agalactiae
  VARIANT 196: Xaa = Any Amino Acid
SDTFNFDIDQIADNAITKTDKTTEIISNQTTSQTGQIAFFEKLTPAQKSAISEKTPALVDTFVGDQNALLDFGQSAVEGVNTTVNHILSEQKKIQIPQVDDLLKNANRELNGFIAKYKDATPAELEKKPNLIQKLFKQSKTSLQEFYFDSQNIEQKMDMMAANVVKQEDTLARNIVSAEMLIEDNTKSIENLVGVXAFIESSQAEAANRASHLQQEILALDSQTSEYQIKSNQLARMTEVINTLEQQHTEYVSRLYVAWATTPQMRNLVKVSSDMRQKLGMLRRNTIPTMKLSIAQLGMMQQSVKSGVTADAIVNANNAALQMLAETSKEAIPMLEKTAQSPTVSIKSVTALAESLVAQNNGIIAAIDKGRKERAQLESAVIKSAETINDSVKIRDKKIVEALLNEGKSTQEKVDES

SEQ ID NO: 587 - protein, 417 aa, Streptococcus agalactiae
SDTFNFDIDQIADNAITKTDKTTEIISNQTTSQTGQIAFFEKLTPAQKSAISEKTPALVDTFVGDQNALLDFGQSAVEGVNTTVNHILSEQKKIQIPQVDDLLKNANRELNGFIAKYKDATPAELEKKPNLIQKLFKQSKTSLQEFYFDSQNIEQKMDMMAANVVKQEDTLARNIVSAEMLIEDNTKSIENLVGVIAFIESSQAEAANRASHLQQEILALDSQTSEYQIKSNQLARMTEVINTLEQQHTEYVSRLYVAWATTPQMRNLVKVSSDMRQKLGMLRRNTIPTMKLSIAQLGMMQQSVKSGVTADAIVNANNAALQMLAETSKEAIPMLEKTAQSPTVSIKSVTALSESLVAQNNGIIAAIDKGRKERAQLESAVIKSAETINDSVKIRDKKIVEALLNEGKSTQEKVDES

SEQ ID NO: 588 - protein, 412 aa, Streptococcus agalactiae
FDIDQIADNAITKTDKTTEIISNQTTSQTGQIAFFEKLTPAQKSAISEKTPALVDTFVGDQNALLDFGQSAVEGVNTTVNHILSEQKKIQIPQVDDLLKNANRELNGFIAKYKDATPAELEKKPNLIQKLFKQSKTSLQEFYFDSQNIEQKMDMMAANVVKQEDTLARNIVSAEMLIEDNTKSIENLVGVIAFIESSQAEAANRASHLQQEILALDSQTSEYQIKSNQLARMTEVINTLEQQHPEYVSRLYVAWATTPQMRNLVKVSSDMRQKLGMLRRNTIPTMKLSIAQLGMMQQSVKSGVTADAIVNANNAALQMLAETSKEAIPMLEKTAQSPTVSIKSVTALAESLVAQNNGIIAAIDKGRKERAQLESAVIKSAETINDSVKIRDKKIVEALLNEGKSTQEKVDES

SEQ ID NO: 589 - protein, 413 aa, Streptococcus agalactiae
SDTFNFDIDQIADNAITKTDKTTEIISNQTTSQTGQIAFFEKLTPAQKSAISEKTPALVDTFVGDQNALLDFGQSAVEGVNTTVNHILSEQKKIQIPQVDDLLKNANRELNGFIAKYKDATPAELEKKPNLIQKLFKQSKTSLQEFYFDSQNIEQKMDMMAANVVKQEDTLARNIVSAEMLIEDNTKSIENLVGVIAFIESSQAEAANRASHLQQEILALDSQTSEYQIKSNQLARMTEVINTLEQQHTEYVSRLYVAWATTPQMRNLVKVSSDMRQKLGMLRRNTIPTMKLSIAQLGMMQQSVKSGVTADAIVNANNAALQMLAETSKEAIPMLEKTAQSPTVSIKSVTALAESLVAQNNGIIAAIDKGRKERAQLESAVIKSAETINDSVKIRDKKIVEALLNEGKSTQEK

SEQ ID NO: 590 - protein, 400 aa, Streptococcus agalactiae
  VARIANT 34: Xaa = Any Amino Acid
KTDKTTEIISNQTTCQTGQIAFFEKLTPAQKSAXSEKTPALVDTFVGDQNALLDFGQSAVEGVNTTVNHILSEQKKIQIPQVDDLLKNANRELNGFIAKYKDATPAELEKKPNLIQKLFKQSKTSLQEFYFDSQNIEQKMDMMAANVVKQEDTLARNIVSAEMLIEDNTKSIENLVGVIAFIESSQAEAANRASHLQQEILALDSQTSEYQIKSNQLARMTEVINTLEQQHTEYVSRLYVAWATTPQMRNLVKVSSDMRQKLGMLRRNTIPTMKLSIAQLGMMQQSVKSGVTADAIVNANNAALQMLAETSKEAIPMLEKTAQSPTVSIKSVTALAESLVAQNNGIIAAIDKGRKERAQLESAVIKSAETINDSVKIRDKKIVEALLNEGKSTQEKVDES

SEQ ID NO: 591 - protein, 400 aa, Streptococcus agalactiae; identical to SEQ ID NO: 590
  VARIANT 34: Xaa = Any Amino Acid

SEQ ID NO: 592 - protein, 412 aa, Streptococcus agalactiae
FDIDQIADNAITKTDKTTEIISNQTTSQTGQIAFFEKLTPAQKSAISEKTPALVDTFVGDQNALLDFGQSAVEGVNTTVNHILSEQKKIQIPQVDDLLKNANRELNGFIAKYKDATPAELEKKPNLIQKLFKQSKTSLQEFYFDSQNIEQKMDMMAANVVKQEDTLARNIVSAEMLIEDNTKSIENLVGVIAFIESSQAEAANRASHLQQEILALDSQTSEYQIKSNQLARMTEVINTLEQQHTEYVSRLYVAWATTPQMRNLVKVSSDMRQKLGMLRRNTIPTMKLSIAQLGMMQQSVKSGVTADAIVNANNAALQMLAETSKEAIPMLEKTAQSPTVSIKSVTALAESLVAQNNGIIAAIDKGRKERAQLESAVIKSAETINDSVKIRDKKIVEALLNEGKSTQEKVDES

SEQ ID NO: 593 - protein, 412 aa, Streptococcus agalactiae; identical to SEQ ID NO: 592

SEQ ID NO: 594 - protein, 406 aa, Streptococcus agalactiae
ADNAITKTDKTTEIISNQTTSQTGQIAFFEKLTPAQKSAISEKTPALVDTFVGDQNALLDFGQSAVEGVNTTVNHILSEQKKIQIPQVDDLLKNANRELNGFIAKYKDATPAELEKKPNLIQKLFKQSKTSLQEFYFDSQNIEQKMDMMAANVVKQEDTLARNIVSAEMLIEDNTKSIENLVGVIAFIESSQAEAANRASHLQQEILALDSQTSEYQIKSNQLARMTEVINTLEQQHTEYVSRLYVAWATTPQMRNLVKVSSDMRQKLGMLRRNTIPTMKLSIAQLGMMQQSVKSGVTADAIVNANNAALQMLAETSKEAIPMLEKTAQSPTVSIKSVTALAESLVAQNNGIIAAIDKGRKERAQLESAVIKSAETINDSVKIRDKKIVEALLNEGKSTQEKVDES

SEQ ID NO: 595 - protein, 417 aa, Streptococcus agalactiae; identical to SEQ ID NO: 585

SEQ ID NO: 596 - protein, 417 aa, Streptococcus agalactiae
SDTFNFDIDQIADNAITKTDKTTEIISNQTTSQTGQIAFFEKLTPAQKSAISEKTPALVDTFVGDQNALLDFGQSAVEGVNTTVNHILSEQKKIQIPQVDDLLKNANRELNGFIAKYKDATPAELEKKPNLIQKLFKQSKTSLQEFYFDSQNIEQKMDMMAANVVKQEDTLARNIVSAEMLIEDNTKSIENLVGVIAFIESSQAEAANRASHLQQEILALDSQTSEYQIKSNQLARMTEVINTLEQQHPEYVSRLYVAWATTPQMRNLVKVSSDMRQKLGMLRRNTIPTMKLSIAQLGMMQQSVKSGVTADAIVNANNAALQMLAETSKEAIPMLEKTAQSPTVSIKSVTALAESLVAQNNGIIAAIDKGRKERAQLESAVIKSAETINDSVKIRDKKIVEALLNEGKSTQEKVDES

SEQ ID NO: 597 - DNA, 762 bp, Streptococcus agalactiae
acaaatactttgaaaaaagaattagttgaagctaaaaagacaattccatccgtaaaagcttcaaaagtaccgcaaaaatcaacatcatcgaaagataaagagtttgttcttaaaccgattatcgatgtctctggttggcaacttcctaaggagattgattacgatacgctttcaaaaaatatttcaggtgttgttattcgtgtctttggtggatcaaagatatctaagactaataacgctgcttatacaactggaatcgataaatcgtttaagacccatatcaaagaatttcaaaagcgaaatatcccagtagctgtctacagttatgcacttggttcaagtgttaaagaaatgaaagaagaggctcagatattttataagaatgcagctccttacaaaccaactttttattggattgacgtagaagaggagacaatgtctaacatgaataaaggtgtccaagcattccgaaaagaattaaaaagacttggtgctaaaaatgttggtatctacattggtacttactttatgactgagcaaggcatctctgtaaaaggatttgacgctgtttggattccaacttatggtagcgattctggatactatgaagcggctccgcaaactgaacttaaatacgatttacaccaatacacctctcaaggttatctaccaggawtcaatcaaccgcttgatttaaatcaaattgcagttaataaagacaagaagaaaacttatgagaaactttttggaaaagtaaaagag

SEQ ID NO: 598 - DNA, 762 bp, Streptococcus agalactiae
acaaatactttgaaaaaagaattagttgaagctaaaaagacaattccatccgtaaaagcttcaaaagtaccgcaaaaatcaacatcatcgaaagataaagagtttgttcttaaaccgattatcgatgtctctggttggcaacttcctaaggagattgattacgatacgctttcaaaaaatatttcaggtgttgttattcgtgtctttggtggatcaaagatatctaagactaataacgctgcttatacaactggaatcgataaatcgtttaagacccatatcaaagaatttcaaaagcgaaatatcccagtagctgtctacagttatgcacttggttcaagtgttaaagaaatgaaagaagaggctcagatattttataagaatgcagctccttacaaaccaactttttattggattgacgtagaagaggagacaatgtctaacatgaataaaggtgtccaagcattccgaaaagaattaaaaagacttggtgctaaaaatgttggtatctacattggtacttactttatgactgagcaaggcatctctgtaaaaggatttgacgctgtttggattccaacttatggtagcgattctggatactatgaagcggctccgcaaactgaacttaaatacgatttacaccaatacacctctcaaggttatctaccaggattcaatcaaccgcttgatttaaatcaaattgcagttaataaagacaagaagaaaacttatgagaaactttttggaaaagtaaaagag

SEQ ID NO: 599 - DNA, 762 bp, Streptococcus agalactiae; identical to SEQ ID NO: 598

SEQ ID NO: 600 - DNA, 762 bp, Streptococcus agalactiae; identical to SEQ ID NO: 598

SEQ ID NO: 601 - DNA, 762 bp, Streptococcus agalactiae; identical to SEQ ID NO: 598

SEQ ID NO: 602 - DNA, 762 bp, Streptococcus agalactiae
acaaatactttgaaaaaagaattagttgaagctaaaaagacaattccatccgtaaaagcttcaaaagtaccgcaaaaatcaacatcatcgaaagataaagagtttgttcttaaaccgattatcgatgtctctggttggcaacttcctaaggagattgattacgatacgctttcaaaaaatatttcaggtgttgttattcgtatctttggtggatcaaagatatctaagactaataacgctgcttatacaactggaatcgataaatcgtttaagacccatatcaaagaatttcaaaagcgaaatatcccagtagctgtctacagttatgcacttggttcaagtgttaaagaaatgaaagaagaggctcagatattttataagaatgcagctccttacaaaccaactttttattggattgacgtagaagaggagacaatgtctaacatgaataaaggtgtccaagcattccgaaaagagttaaaaagacttggtgctaaaaatgttggtatctacatcggtacttactttatgactgagcaaggtatctctgtaaaaggatttgacgctgtttggattccaacttatggtagcgattctggatactatgaagcagctccacaaactgaacttaaatacgatttacaccaatacacctctcaaggttatctaccaggattcaatcaaccgcttgatttaaatcaaattgcagttaataaagacaagaagaaaacttatgagaaactttttggaaaagtaaaagag

SEQ ID NO: 603 - DNA, 762 bp, Streptococcus agalactiae; identical to SEQ ID NO: 602

SEQ ID NO: 604 - DNA, 762 bp, Streptococcus agalactiae; identical to SEQ ID NO: 602

SEQ ID NO: 605 - DNA, 760 bp, Streptococcus agalactiae
aaatactttgaaaaaagaattagttgaagctaaaaagacaattccatccgtaaaagcttcaaaagtaccgcaaaaatcaacatcatcgaaagataaagagtttgttcttaaaccgattatcgatgtctctggttggcaacttcctaaggagattgattacgatacgctttcaaaaaatatttcaggtgttgttattcgtgtctttggtggatcaaagatatctaagactaataacgctgcttatacaactggaatcgataaatcgtttaagacccatatcaaagaatttcaaaagcgaaatatcccagtagctgtctacagttatgcacttggttcaagtgttaaagaaatgaaagaagaggctcagatattttataagaatgcagctccttacaaaccaactttttattggattgacgtagaagaggagacaatgtctaacatgaataaaggtgtccaagcattccgaaaagaattaaaaagacttggtgctaaaaatgttggtatctacattggtacttactttatgactgagcaaggcatctctgtaaaaggatttgacgctgtttggattccaacttatggtagcgattctggatactatgaagcggctccgcaaactgaacttaaatacgatttacaccaatacacctctcaaggttatctaccaggattcaatcaaccgcttgatttaaatcaaattacagttaataaagacaagaagaaaacttatgagaaactttttggaaaagtaaaagag

SEQ ID NO: 606 - DNA, 762 bp, Streptococcus agalactiae
acaaatactttgaaaaaagaattagttgaagctaaaaagacaattccatccgtaaaagcttcaaaagtaccgcaaaaatcaacatcatcgaaagataaagagtttgttcttaaaccgattatcgatgtctctggttggcaacttcctaaggagattgattacgatacgctttcaaaaaatatttcaggtgttgttattcgtgtctttggtggatcaaagatatctaagactaataacgctgcttatacaactggaatcgataaatcgtttaagacccatatcaaagaatttcaaaagcgaaatatcccagtagctgtctacagttatgcacttggttcaagtgttaaagaaatgaaagaagaggctcagatattttataagaatgcagctccttacaaaccaactttttattggattgacgtagaagaggagacaatgtctaacatgaataaaggtgtccaagcattccgaaaagaattaaaaagacttggcgctaaaaatgttggtatctacatcggtacttactttatgactgagcaaggtatctctgtaaaaggatttgacgctgtttggattccaacttatggtagcgattctggatactatgaagcagctccgcaaactgaacttaaatacgatttacaccaatacacctctcaaggttatctaccaggattcaatcaaccgcttgatttaaatcaaattgcagttaataaagacaagaagaaaacttatgagaaactttttggaaaagtaaaagag

SEQ ID NO: 607 - DNA, 762 bp, Streptococcus agalactiae; identical to SEQ ID NO: 598

SEQ ID NO: 608 - protein, 254 aa, Streptococcus agalactiae
  VARIANT 226: Xaa = Any Amino Acid
TNTLKKELVEAKKTIPSVKASKVPQKSTSSKDKEFVLKPIIDVSGWQLPKEIDYDTLSKNISGVVIRVFGGSKISKTNNAAYTTGIDKSFKTHIKEFQKRNIPVAVYSYALGSSVKEMKEEAQIFYKNAAPYKPTFYWIDVEEETMSNMNKGVQAFRKELKRLGAKNVGIYIGTYFMTEQGISVKGFDAVWIPTYGSDSGYYEAAPQTELKYDLHQYTSQGYLPGXNQPLDLNQIAVNKDKKKTYEKLFGKVKE

SEQ ID NO: 609 - protein, 254 aa, Streptococcus agalactiae
TNTLKKELVEAKKTIPSVKASKVPQKSTSSKDKEFVLKPIIDVSGWQLPKEIDYDTLSKNISGVVIRVFGGSKISKTNNAAYTTGIDKSFKTHIKEFQKRNIPVAVYSYALGSSVKEMKEEAQIFYKNAAPYKPTFYWIDVEEETMSNMNKGVQAFRKELKRLGAKNVGIYIGTYFMTEQGISVKGFDAVWIPTYGSDSGYYEAAPQTELKYDLHQYTSQGYLPGFNQPLDLNQIAVNKDKKKTYEKLFGKVKE

SEQ ID NO: 610 - protein, 254 aa, Streptococcus agalactiae; identical to SEQ ID NO: 609

SEQ ID NO: 611 - protein, 254 aa, Streptococcus agalactiae; identical to SEQ ID NO: 609

SEQ ID NO: 612 - protein, 254 aa, Streptococcus agalactiae; identical to SEQ ID NO: 609

SEQ ID NO: 613 - protein, 254 aa, Streptococcus agalactiae
TNTLKKELVEAKKTIPSVKASKVPQKSTSSKDKEFVLKPIIDVSGWQLPKEIDYDTLSKNISGVVIRIFGGSKISKTNNAAYTTGIDKSFKTHIKEFQKRNIPVAVYSYALGSSVKEMKEEAQIFYKNAAPYKPTFYWIDVEEETMSNMNKGVQAFRKELKRLGAKNVGIYIGTYFMTEQGISVKGFDAVWIPTYGSDSGYYEAAPQTELKYDLHQYTSQGYLPGFNQPLDLNQIAVNKDKKKTYEKLFGKVKE

SEQ ID NO: 614 - protein, 254 aa, Streptococcus agalactiae; identical to SEQ ID NO: 613

SEQ ID NO: 615 - protein, 254 aa, Streptococcus agalactiae; identical to SEQ ID NO: 613

SEQ ID NO: 616 - protein, 253 aa, Streptococcus agalactiae
NTLKKELVEAKKTIPSVKASKVPQKSTSSKDKEFVLKPIIDVSGWQLPKEIDYDTLSKNISGVVIRVFGGSKISKTNNAAYTTGIDKSFKTHIKEFQKRNIPVAVYSYALGSSVKEMKEEAQIFYKNAAPYKPTFYWIDVEEETMSNMNKGVQAFRKELKRLGAKNVGIYIGTYFMTEQGISVKGFDAVWIPTYGSDSGYYEAAPQTELKYDLHQYTSQGYLPGFNQPLDLNQITVNKDKKKTYEKLFGKVKE

SEQ ID NO: 617 - protein, 254 aa, Streptococcus agalactiae; identical to SEQ ID NO: 609

SEQ ID NO: 618 - protein, 254 aa, Streptococcus agalactiae; identical to SEQ ID NO: 609

SEQ ID NO: 619 - DNA, 828 bp, Streptococcus agalactiae
ttgactcacaaaaatatattattaaccattatatttggattatttatgattatattatcagcatgtggtatgtctaataaggaaatggctggtattgataattgggaacattatcaaaaggaaaagaaaattactattggatttgataatacttttgttcctatgggatttgaaagtcgttctggtgactataccggctttgatattgatttagctaatgctgtttttaaagaatacggtatttcagtgaaatggcagcctattaactgggatatgaaagaaactgaacttaataatggtaatatagaccttatttggaatggttattcaaaaacggcagaacgtgctaaaaaagtcgcttttacaaacccatatatgaataatcatcaagtaattgttactaaaacttcatcacatattaatagtattaaggatatgaaggggaaaaaactaggagcccagtcgggttcatctggttttgatgcttttaacgctaaacctgatattttaaaaaagtttgtaaaaggaaaagaagcagttcaatacgatactttcactcaggctttgattgatttaaaaaataaccgtattgatggtcttttgattgatgaagtttatgctaactattatttaaagcaagaaggaaatataaaagcttattattttgttaaaactgcttatcaaggagaaaattttgtagtaggagctcgtaaagttgatcgtagactaattgaaaagattaacaaagctttcaaacagcttcataataaggggagatttcaaaaaatctcttacaaatggtttggtgaagatgtttatagtaaagaa

SEQ ID NO: 620 - DNA, 728 bp, Streptococcus agalactiae
attgggaacattatcaaaaggaaaagaaaattactattggatttgataatacttttgttcctatgggatttgaaagccgttctggtgactataccggctttgatattgatttagctaatgctgtttttaaagaatacggtatttcagtgaaatggcagcctattaactgggatatgaaagaaactgaacttaataatggtaatatagaccttatttggaatggttattcaaaaacggcagaacgtgctaaaaaagtcgcttttacaaacccatatatgaataatcatcaagtaattgttactaaaacttcatcacatattaatagtattaaggatatgaaggggaaaaaactaggagcccagtcgggttcatctggttttgatgcttttaatgctaaacctgatattttaaaaaagtttgtaaaaggaaaagaagcagttcaatacgatactttcactcaggctttgattgatttaaaaaataaccgtattgatggtcttttgattgatgaagtttatgctaactattatttaaagcaagaaggaaatataaaagcttattattttgttaaaactgcttatcaaggagaaaattttgtagtaggagctcgcaaagttgatcgtagactaattgaaaagattaacaaagctttcaaacagcttcataataagggaaaatttcaaaaaatctcttacaaatggtttggtgaagatgtttatagtaaagaa

SEQ ID NO: 621 - DNA, 728 bp, Streptococcus agalactiae
attgggaacattatcaaaaggaaaagaaaattactattggatttgataatacttttgttcctatgggatttgaaagtcgttctggtgactataccggctttgatattgatttagctaatgctgtttttaaagaatacggtatttcagtgaaatggcagcctattaactgggatatgaaagaaactgaacttaataatggtaatatagaccttatttggaatggttattcaaaaacggcagaacgtgctaaaaaagtcgcttttacaaacccatatatgaataatcatcaagtaattgttactaaaacttcatcacatattaatagtattaaggatatgaaggggaaaaaactaggagcccagtcgggttcatctggttttgatgcttttaacgctaaacctgatattttaaaaaagtttgtaaaaggaaaagaagcagttcaatacgatactttcactcaggctttgattgatttaaaaaataaccgtattgatggtcttttgattgatgaagtttatgctaactattatttaaagcaagaaggaaatataaaagcttattattttgttaaaactgcttatcaaggagaaaattttgtagtaggagctcgtaaagttgatcgtagactaattgaaaagattaacaaagctttcaaacagcttcataataaggggagatttcaaaaaatctcttacaaatggtttggtgaagatgtttatagtaaagaa

SEQ ID NO: 622 - DNA, 728 bp, Streptococcus agalactiae; identical to SEQ ID NO: 621

SEQ ID NO: 623 - DNA, 728 bp, Streptococcus agalactiae; identical to SEQ ID NO: 621

SEQ ID NO: 624 - DNA, 728 bp, Streptococcus agalactiae; identical to SEQ ID NO: 621

SEQ ID NO: 625 - DNA, 728 bp, Streptococcus agalactiae; identical to SEQ ID NO: 621

SEQ ID NO: 626 - DNA, 728 bp, Streptococcus agalactiae; identical to SEQ ID NO: 621

SEQ ID NO: 627 - DNA, 728 bp, Streptococcus agalactiae; identical to SEQ ID NO: 621

SEQ ID NO: 628 - DNA, 728 bp, Streptococcus agalactiae
attgggaacattatcaaaaggaaaagaaaattactattggatttgataatacttttgttcctatgggatttgaaagtcgttctggtgactataccggctttgatattgatttagctaatgctgtttttaaagaatacggtatttcagtgaaatggcagcctattaactgggatatgaaagaaactgaactcaataatggtaatatagaccttatttggaatggttattcaaaaacggcagaacgtgctaaaaaagtcgcttttacaaacccatatatgaataatcatcaagtaattgttactaaaacttcatcacatattaatagtattaaggatatgaaggggaaaaaactaggagcccagtcgggttcatctggttttgatgcttttaatgctaaacctgacattttaaaaaagtttgtaaaaggaaaagaagcagttcaatacgatactttcactcaggctttgattgatttaaaaaataaccgtattgatggtcttttgattgatgaagtttatgctaactattatttaaagcaagaaggaaatataaaagcttattattttgttaaaactgcttatcaaggagaaaattttgtagtaggagctcgcaaagttgatcgtagactaattgaaaagattaacaaagctttcaaacagcttcataataaggggaaatttcaaaaaatctcttacaaatggtttggtgaagatgtttatagtaaagaa

SEQ ID NO: 629 - DNA, 728 bp, Streptococcus agalactiae; identical to SEQ ID NO: 621

SEQ ID NO: 630 - protein, 276 aa, Streptococcus agalactiae
LTHKNILLTIIFGLFMIILSACGMSNKEMAGIDNWEHYQKEKKITIGFDNTFVPMGFESRSGDYTGFDIDLANAVFKEYGISVKWQPINWDMKETELNNGNIDLIWNGYSKTAERAKKVAFTNPYMNNHQVIVTKTSSHINSIKDMKGKKLGAQSGSSGFDAFNAKPDILKKFVKGKEAVQYDTFTQALIDLKNNRIDGLLIDEVYANYYLKQEGNIKAYYFVKTAYQGENFVVGARKVDRRLIEKINKAFKQLHNKGRFQKISYKWFGEDVYSKE

SEQ ID NO: 631 - protein, 242 aa, Streptococcus agalactiae
WEHYQKEKKITIGFDNTFVPMGFESRSGDYTGFDIDLANAVFKEYGISVKWQPINWDMKETELNNGNIDLIWNGYSKTAERAKKVAFTNPYMNNHQVIVTKTSSHINSIKDMKGKKLGAQSGSSGFDAFNAKPDILKKFVKGKEAVQYDTFTQALIDLKNNRIDGLLIDEVYANYYLKQEGNIKAYYFVKTAYQGENFVVGARKVDRRLIEKINKAFKQLHNKGKFQKISYKWFGEDVYSKE

SEQ ID NO: 632 - protein, 242 aa, Streptococcus agalactiae
WEHYQKEKKITIGFDNTFVPMGFESRSGDYTGFDIDLANAVFKEYGISVKWQPINWDMKETELNNGNIDLIWNGYSKTAERAKKVAFTNPYMNNHQVIVTKTSSHINSIKDMKGKKLGAQSGSSGFDAFNAKPDILKKFVKGKEAVQYDTFTQALIDLKNNRIDGLLIDEVYANYYLKQEGNIKAYYFVKTAYQGENFVVGARKVDRRLIEKINKAFKQLHNKGRFQKISYKWFGEDVYSKE

SEQ ID NO: 633 - protein, 242 aa, Streptococcus agalactiae; identical to SEQ ID NO: 632

SEQ ID NO: 634 - protein, 242 aa, Streptococcus agalactiae; identical to SEQ ID NO: 632

SEQ ID NO: 635 - protein, 242 aa, Streptococcus agalactiae; identical to SEQ ID NO: 632

SEQ ID NO: 636 - protein, 242 aa, Streptococcus agalactiae; identical to SEQ ID NO: 632

SEQ ID NO: 637 - protein, 242 aa, Streptococcus agalactiae; identical to SEQ ID NO: 632

SEQ ID NO: 638 - protein, 242 aa, Streptococcus agalactiae; identical to SEQ ID NO: 632

SEQ ID NO: 639 - protein, 242 aa, Streptococcus agalactiae; identical to SEQ ID NO: 631

SEQ ID NO: 640 - protein, 242 aa, Streptococcus agalactiae; identical to SEQ ID NO: 632

SEQ ID NO: 641 - DNA, 249 bp, Streptococcus agalactiae
atgcttaaatcttttttgattttcttagttcgcttttaccaaaaaaatatttctccagctttcccagctagctgtcgttatcgtccaacttgctctacgtatatgatagaagctattcaaaaacatggtctaaaaggtgtgttgatggggattgcacgtattttgcgatgtcatcccttagcccacggaggaaatgatcctgtccctgatcattttagcttaagacgtaataaaacggatatatcagat

SEQ ID NO: 642 - DNA, 161 bp, Streptococcus agalactiae
ttcccagctagctgtcgttatcgtccaacttgctctacgtatatgatagaagctattcaaaaacatggtctaaaaggtgtgttgatggggattgcacgtattttgcgatgtcatcccttagcccacggaggaaatgatcctgtccctgatcattttagctt

SEQ ID NO: 643 - DNA, 183 bp, Streptococcus agalactiae
ttcccagctagctgtcgttatcgtccaacttgctctacgtatatgatagaagctattcaaaaacatggtctaaaaggtgtgttgatggggattgcacgtattttgcgatgtcatcccttagcccacggaggaaatgatcctgtccctgatcattttagcttaagacgtaataaaacggatata

SEQ ID NO: 644 - DNA, 189 bp, Streptococcus agalactiae
ttcccagctagctgtcgttatcgtccaacttgctctacgtatatgatagaagctattcaaaaacatggtctaaaaggtgttctgatggggattgcacgtattttgcgatgtcatcccttagcccacggaggaaatgatcctgtccctgatcattttagcttaagacgtaataaaacggatatatcagat

SEQ ID NO: 645 - DNA, 189 bp, Streptococcus agalactiae
ttcccagctagctgtcgttatcgtccaacttgctctacgtatatgatagaagctattcaaaaacatggtctaaaaggtgtgttgatggggattgcacgtattttgcgatgtcatcccttagcccacggaggaaatgatcctgtccctgatcattttagcttaagacgtaataaaacggatatatcagat

SEQ ID NO: 646 - DNA, 189 bp, Streptococcus agalactiae; identical to SEQ ID NO: 645

SEQ ID NO: 647 - DNA, 160 bp, Streptococcus agalactiae
ttcccagctagctgtcgttatcgtccaacttgctctacgtatatgatagaagctattcaaaaacatggtctaaaaggtgtgttgatggggattgcacgtattttgcgatgtcatcccttagcccacggaggaaatgatcctgtccctgatcattttagct

SEQ ID NO: 648 - DNA, 189 bp, Streptococcus agalactiae; identical to SEQ ID NO: 645

SEQ ID NO: 649 - DNA, 189 bp, Streptococcus agalactiae; identical to SEQ ID NO: 645

SEQ ID NO: 650 - DNA, 189 bp, Streptococcus agalactiae
ttcccagctagctgtcgttatcgtccaacttgctctacgtatatgatagaagctattcaaaaacatggtctaaaaggtgtggtgatggggattgcacgtattttgcgatgtcatcccttagcccacggaggaaatgatcctgtccctgattattttagcttaagacgtaataaaacggatatatcagat

SEQ ID NO: 651 - DNA, 189 bp, Streptococcus agalactiae; identical to SEQ ID NO: 644

SEQ ID NO: 652 - protein, 83 aa, Streptococcus agalactiae
MLKSFLIFLVRFYQKNISPAFPASCRYRPTCSTYMIEAIQKHGLKGVLMGIARILRCHPLAHGGNDPVPDHFSLRRNKTDISD

SEQ ID NO: 653 - protein, 53 aa, Streptococcus agalactiae
FPASCRYRPTCSTYMIEAIQKHGLKGVLMGIARILRCHPLAHGGNDPVPDHFS

SEQ ID NO: 654 - protein, 61 aa, Streptococcus agalactiae
FPASCRYRPTCSTYMIEAIQKHGLKGVLMGIARILRCHPLAHGGNDPVPDHFSLRRNKTDI

SEQ ID NO: 655 - protein, 63 aa, Streptococcus agalactiae
FPASCRYRPTCSTYMIEAIQKHGLKGVLMGIARILRCHPLAHGGNDPVPDHFSLRRNKTDISD

SEQ ID NO: 656 - protein, 63 aa, Streptococcus agalactiae; identical to SEQ ID NO: 655

SEQ ID NO: 657 - protein, 63 aa, Streptococcus agalactiae; identical to SEQ ID NO: 655

SEQ ID NO: 658 - protein, 53 aa, Streptococcus agalactiae; identical to SEQ ID NO: 653

SEQ ID NO: 659 - protein, 63 aa, Streptococcus agalactiae; identical to SEQ ID NO: 655

SEQ ID NO: 660 - protein, 63 aa, Streptococcus agalactiae; identical to SEQ ID NO: 655

SEQ ID NO: 661 - protein, 63 aa, Streptococcus agalactiae
FPASCRYRPTCSTYMIEAIQKHGLKGVVMGIARILRCHPLAHGGNDPVPDYFSLRRNKTDISD

SEQ ID NO: 662 - protein, 63 aa, Streptococcus agalactiae; identical to SEQ ID NO: 655

SEQ ID NO: 663 - DNA, 621 bp, Streptococcus agalactiae
aagaagcttacttttatttgggatttagatgggacattaatagattcgtatgtaccaattatggaagctcttgaagaaacctatcgtcattttggtttaatatttgataaagaattaatccatgaatatattttacaggaatcagtggggaaattattggtaaacctttcagaggaagagcaaatacctcatgaaaaactgaaagcatattttacaaaagaacaagaaagtcgagattctaaaatacatttaatgccatatgcaaaagagattttagaatggaccaaagaacaagatatccccaattttatgtatacacataaaggagcaagtacgcattcagtgttggaaaccttgcagatctctcattattttgatgaaattttaactggtgtttcgggattcgagcgaaaaccacatccacaagggattaattatttagttaaacgatattctttagataaatcaatgacttattacataggagatcgtccactagatttggaggttgctcaaaatgctggtataaaatccataaacttaaggttagagaattccaaagaaaactataatatttcaagtctcaaagatataatatcacttgatttcactcgtttggat

SEQ ID NO: 664 - DNA, 621 bp, Streptococcus agalactiae
aagaagcttacttttatttgggatttagatgggacattaatagattcgtatgtaccaattatggaagctcttgaagaaacctatcgtcattttggcttaatatttgataaagaattaatccatgaatatattttacaggaatcagtggggcaattattggtaaacctttcagaggaagagcaaatacctcatgaaaaactgaaagcatattttacaaaagaacaagaaagtcgagattctaaaatacatttaatgccatatgcaaaagagattttagaatggaccaaagaacaagatattcccaattttatgtatacacataaaggagcaagtacgcattcagtgttggaaaccttgcagatctctcattattttgatgaaattttaactggtgtttcgggattcgagcgaaaaccacatccacaagggattaattatttagttaaacgatattctttagataaatcaatgacttattacataggagatcgtccactagatttggaggttgctcaaaatgctggtataaaatccataaacttaaggttagagaattccaaagaaaactataatatttcaagtctcaaagatataatatcacttgatttcactcgtttggat

SEQ ID NO: 665 - DNA, 615 bp, Streptococcus agalactiae
aagaagcttacttttatttgggatttagatgggacattaatagattcgtatgtaccaattatggaagctcttgaagaaacctatcgtcattttggtttaatatttgataaagaattaatccatgaatatattttacaggaatcagtggggaaattattggtaaacctttcagaggaagagcaaatacctcatgaaaaactgaaagcatattttacaaaagaacaagaaagtcgagattctaaaatacatttaatgccatatgcaaaagagattttagaatggaccaaagaacaagatatccccaattttatgtatacacataaaggagcaagtacgcattcagtgttggaaaccttgcagatctctcattattttgatgaaattttaactggtgtttcgggattcgagcgaaaaccacatccacaagggattaattatttagttaaacgatattctttagataaatcaatgacttattacataggagatcgtccactagatttggaggttgctcaaaatgctggtataaaatccataaacttaaggttagagaattccaaagaaaactataatatttcaagtctcaaagatataatatcacttgatttcactcgt

SEQ ID NO: 666 - DNA, 621 bp, Streptococcus agalactiae; identical to SEQ ID NO: 663

SEQ ID NO: 667 - DNA, 621 bp, Streptococcus agalactiae; identical to SEQ ID NO: 663

SEQ ID NO: 668 - DNA, 621 bp, Streptococcus agalactiae; identical to SEQ ID NO: 664

SEQ ID NO: 669 - DNA, 616 bp, Streptococcus agalactiae
aagaagcttacttttatttgggatttagatgggacattaatagattcgtatgtaccaattatggaagctcttgaagaaacctatcgtcattttggcttaatatttgataaagaattaatccatgaatatattttacaggaatcagtggggcaattattggtaaacctttcagaggaagagcaaatacctcatgaaaaactgaaagcatattttacaaaagaacaagaaagtcgagattctaaaatacatttaatgccatatgcaaaagagattttagaatggaccaaagaacaagatatccccaattttatgtatacacataaaggagcaagtacgcattcagtgttggaaaccttgcagatctctcattattttgatgaaattttaactggtgtttctggattcgagcgaaaaccacatccacaagggattaattatttagttaaacgatattctttagataaatcaatgacttattacataggagatcgtcccctagatttggaggttgctcaaaatgctggtataaaatccataaacttaaggttagagaattccaaagaaaactataatatttcaagtctcaaggatataatatcacttgatttcactcgtt

SEQ ID NO: 670 - DNA, 621 bp, Streptococcus agalactiae
aagaagcttacttttatttgggatttagatgggacattaatagattcgtatgtaccaattatagaagctcttgaagaaacctatcgtcattttggcttaatatttgataaagaattaatccatgaatatattttacaggaatcagtggggaaattattggtaaacctttcagaggaagagcaaatacctcatgaaaaactgaaagcatattttacaaaagaacaagaaagtcgagattctaaaatacatttaatgccatacgcaaaagagattttagaatggaccaaagaacaagatatccccaattttatgtatacacataaaggagcaagtacgcattcagtgttggaaaccttgcagatctctcattattttgatgaaattttaactggtgtttcgggattcgagcgaaaaccacatccacaagggattaattatttagttaaacgatattctttagataaatcaatgacttattacataggagatcgtcccctagatttggaggttgctcaaaatgctggtataaaatccataaacttaaggttagagaattccaaagaaaactataatatttcaagtctcaaggatataatatcacttgatttcactcgtttggat

SEQ ID NO: 671 - DNA, 615 bp, Streptococcus agalactiae; identical to SEQ ID NO: 665

SEQ ID NO: 672 - DNA, 615 bp, Streptococcus agalactiae
aagaagcttacttttatttgggatttagatgggacattaatagattcgtatgtaccaattatggaagctcttgaagaaacctatcgtcattttggcttaatatttgataaagaattaatccatgaatatattttacaggaatcagtggggcaattattggtaaacctttcagaggaagagcaaatacctcatgaaaaactgaaagcatattttacaaaagaacaagaaagtcgagattctaaaatacatttaatgccatatgcaaaagagattttagaatggaccaaagaacaagatatccccaattttatgtatacacataaaggagcaagtacgcattcagtgttggaaaccttgcagatctctcattattttgatgaaattttaactggtgtttctggattcgagcgaaaaccacatccacaagggattaattatttagttaaacgatattctttagataaatcaatgacttattacataggagatcgtcccctagatttggaggttgctcaaaatgctggtataaaatccataaacttaaggttagagaattccaaagaaaactataatatttcaagtctcaaggatataatatcacttgatttcactcgt

SEQ ID NO: 673 - DNA, 615 bp, Streptococcus agalactiae
aagaagcttacttttatttgggatttagatgggacattaatagattcgtatgtaccaattatggaagctcttgaagaaacctatcgtcattttggcttaatatttgataaagaattaatccatgaatatattttacaggaatcagtggggcaattattggtaaacctttcagaggaagagcaaatacctcatgaaaaactgaaagcatattttacaaaagaacaagaaagtcgagattytaaaatacatttaatgccatatgcaaaagagattttagaatggaccaaagaacaagatattcccaattttatgtatacacataaaggagcaagtacgcattcagtgttggaaaccttgcagatctctcattattttgatgaaattttaactggtgtttcgggattcgagcgaaaaccacatccacaagggattaattatttagttaaacgatattctttagataaatcaatgacttattacataggagatcgtccactagatttggaggttgctcaaaatgctggtataaaatccataaacttaaggttagagaattccaaagaaaactataatatttcaagtctcaaagatataatatcacttgatttcactcgt

SEQ ID NO: 674 - protein, 207 aa, Streptococcus agalactiae
KKLTFIWDLDGTLIDSYVPIMEALEETYRHFGLIFDKELIHEYILQESVGKLLVNLSEEEQIPHEKLKAYFTKEQESRDSKIHLMPYAKEILEWTKEQDIPNFMYTHKGASTHSVLETLQISHYFDEILTGVSGFERKPHPQGINYLVKRYSLDKSMTYYIGDRPLDLEVAQNAGIKSINLRLENSKENYNISSLKDIISLDFTRLD

SEQ ID NO: 675 - protein, 205 aa, Streptococcus agalactiae
KKLTFIWDLDGTLIDSYVPIMEALEETYRHFGLIFDKELIHEYILQESVGKLLVNLSEEEQIPHEKLKAYFTKEQESRDSKIHLMPYAKEILEWTKEQDIPNFMYTHKGASTHSVLETLQISHYFDEILTGVSGFERKPHPQGINYLVKRYSLDKSMTYYIGDRPLDLEVAQNAGIKSINLRLENSKENYNISSLKDIISLDFTR

SEQ ID NO: 676 - protein, 207 aa, Streptococcus agalactiae; identical to SEQ ID NO: 674

SEQ ID NO: 677 - protein, 207 aa, Streptococcus agalactiae; identical to SEQ ID NO: 674

SEQ ID NO: 678 - protein, 207 aa, Streptococcus agalactiae
KKLTFIWDLDGTLIDSYVPIMEALEETYRHFGLIFDKELIHEYILQESVGQLLVNLSEEEQIPHEKLKAYFTKEQESRDSKIHLMPYAKEILEWTKEQDIPNFMYTHKGASTHSVLETLQISHYFDEILTGVSGFERKPHPQGINYLVKRYSLDKSMTYYIGDRPLDLEVAQNAGIKSINLRLENSKENYNISSLKDIISLDFTRLD

SEQ ID NO: 679 - protein, 207 aa, Streptococcus agalactiae; identical to SEQ ID NO: 678

SEQ ID NO: 680 - protein, 205 aa, Streptococcus agalactiae
KKLTFIWDLDGTLIDSYVPIMEALEETYRHFGLIFDKELIHEYILQESVGQLLVNLSEEEQIPHEKLKAYFTKEQESRDSKIHLMPYAKEILEWTKEQDIPNFMYTHKGASTHSVLETLQISHYFDEILTGVSGFERKPHPQGINYLVKRYSLDKSMTYYIGDRPLDLEVAQNAGIKSINLRLENSKENYNISSLKDIISLDFTR

SEQ ID NO: 681 - protein, 207 aa, Streptococcus agalactiae
KKLTFIWDLDGTLIDSYVPIIEALEETYRHFGLIFDKELIHEYILQESVGKLLVNLSEEEQIPHEKLKAYFTKEQESRDSKIHLMPYAKEILEWTKEQDIPNFMYTHKGASTHSVLETLQISHYFDEILTGVSGFERKPHPQGINYLVKRYSLDKSMTYYIGDRPLDLEVAQNAGIKSINLRLENSKENYNISSLKDIISLDFTRLD

SEQ ID NO: 682 - protein, 205 aa, Streptococcus agalactiae; identical to SEQ ID NO: 675

SEQ ID NO: 683 - protein, 205 aa, Streptococcus agalactiae; identical to SEQ ID NO: 680

SEQ ID NO: 684 - protein, 205 aa, Streptococcus agalactiae
  VARIANT 80: Xaa = Any Amino Acid
KKLTFIWDLDGTLIDSYVPIMEALEETYRHFGLIFDKELIHEYILQESVGQLLVNLSEEEQIPHEKLKAYFTKEQESRDXKIHLMPYAKEILEWTKEQDIPNFMYTHKGASTHSVLETLQISHYFDEILTGVSGFERKPHPQGINYLVKRYSLDKSMTYYIGDRPLDLEVAQNAGIKSINLRLENSKENYNISSLKDIISLDFTR

SEQ ID NO: 685 - DNA, 591 bp, Streptococcus agalactiae
atgcttatgacaaaaataataggactgacaggagggatagcttctggaaagtcaacggtaacaaaaataatacgagaatcaggttttaaagtcatagatgcggatcaagtggttcataaattgcaagctaagggtgggaaactttaccaagctttattagaatggttgggtcccgagatacttgatgctgatggtgagttggatagaccaaagctttctcaaatgatttttgctaatccagacaatatgaagacatcagctaggctacaaaatagtatcattcgtcaagagttagcatgtcagcgcgaccaattaaaacaaacagaagagatatttttcatggatattcctttattgattgaagaaaagtatataaaatggtttgatgagatttggttggtatttgttgataaagaaaaacaattacaacgattaatggcccgtaacaactacagtcgagaagaagcagaattacgactttcacaccaaatgcctttaacagataaaaaaagtttcgctagtcttattattgacaataatggtgatttaataactttaaaagagcaaatattggatgctcttcaacgttta

SEQ ID NO: 686 - DNA, 543 bp, Streptococcus agalactiae
aagtcaacggtaacaaaaataatacgagaatcaggttttaaagtcatagatgcggatcaagtggttcataaattgcaagctaagggtgggaaactttaccaagctttattagaatggttgggtcccgagatacttgatgctgatggtgagttggatagaccaaagctttctcaaatgatttttgctaatccagacaatatgaagacatcagctaggctacaaaatagtatcattcgtcaagagttagcatgtcagcgcgaccaattaaaacaaacagaagagatatttttcgtggatattcctttattgattgaagaaaagtatataaaatggtttgatgagatttggttggtatttgttgataaagaaaaacaattacaacgattaatggcccgtaacaactacagtcgagaagaagcagaattacgactttcacaccaaatgcctttaacagataaaaaaagtttcgctagtcttattattaataataatggtgatttaataactttaaaagagcaaatattggatgctcttcaacgttta

SEQ ID NO: 687 - DNA, 543 bp, Streptococcus agalactiae
aagtcaacggtaacaaaaataatacgagaatcaggttttaaagtcatagatgcggatcaagtggttcataaattgcaagctaagggtgggaaactttaccaagctttattagaatggttgggtcccgagatacttgatgctgatggtgagttggatagaccaaagctttctcaaatgatttttgctaatccagacaatatgaagacatcagctaggctacaaaatagtatcattcgtcaagagttagcatgtcagcgcgaccaattaaaacaaacagaagagatatttttcatggatattcctttattgattgaagaaaagtatataaaatggtttgatgagatttggttggtatttgttgataaagaaaaacaattacaacgattaatggcccgtaacaactacagtcgagaagaagcagaattacgactttcacaccaaatgcctttaacagataaaaaaagtttcgctagtcttattattgacaataatggtgatttaataactttaaaagagcaaatattggatgctcttcaacgttta

SEQ ID NO: 688 - DNA, 543 bp, Streptococcus agalactiae
aagtcaacggtaacaaaaataatacgagaatcaggttttaaagtcatagatgcggatcaagtggttcataaattgcaagctaagggtgggaaactttaccaagctttattagaatggttgggtcccgagatacttgatgctgatggtgagttggatagaccaaagctttctcaaatgatttttgctaatccagacaatatgaagacatcagctaggctacaaaatagtatcattcgtcaagagttagcatgtcagcgcgaccaattaaaacaaacagaagagatatttttcatggatattcctttattgattgaagaaaagtatataaaatggtttgatgagatttggttggtatttgttgataaagaaaaacaattacaacgattaatggcccgtaacaactacagtcgagaagaagcggaattacgactttcacaccaaatacctttaacagataaaaaaagtttcgctagtcttattattgataataatggtgatttaataactttaaaagagcaaatgttggatgctcttcaacgttta

SEQ ID NO: 689 - DNA, 543 bp, Streptococcus agalactiae; identical to SEQ ID NO: 687

SEQ ID NO: 690 - DNA, 543 bp, Streptococcus agalactiae; identical to SEQ ID NO: 687

SEQ ID NO: 691 - DNA, 543 bp, Streptococcus agalactiae; identical to SEQ ID NO: 687

SEQ ID NO: 692 - DNA, 543 bp, Streptococcus agalactiae; identical to SEQ ID NO: 687

SEQ ID NO: 693 - DNA, 543 bp, Streptococcus agalactiae; identical to SEQ ID NO: 686

SEQ ID NO: 694 - DNA, 543 bp, Streptococcus agalactiae
aagtcaacggtaacaaaaataatacgagaatcaggttttaaagtcatagatgcggatcaagtggttcataaattgcaagctaagggtgggaaactttaccaagctttattagaatggttgggtcccgagatacttgatgctgatggtgagttggatagaccaaagctttctcaaatgatttttgctaatccagacaatatgaagacatcagctaggctacaaaatagtatcattcgtcaagagttagcatgtcagcgcgaccaattaaaacaaacagaagagatatttttcatggatattcctttattgattgaagaaaagtatataaaatggtttgatgagatttggttggtatttgttgataaagaaaaacaattacaacgattaatggcccgtaacaactacagtcgagaagaagcagaattacgactttcacaccaaatacctttaacagataaaaaaagtttcgctagtcttattattgataataatggtgatttaataactttaaaagagcaaatgttggatgctcttcaacgttta

SEQ ID NO: 695 - DNA, 543 bp, Streptococcus agalactiae; identical to SEQ ID NO: 688

SEQ ID NO: 696 - protein, 197 aa, Streptococcus agalactiae
MLMTKIIGLTGGIASGKSTVTKIIRESGFKVIDADQVVHKLQAKGGKLYQALLEWLGPEILDADGELDRPKLSQMIFANPDNMKTSARLQNSIIRQELACQRDQLKQTEEIFFMDIPLLIEEKYIKWFDEIWLVFVDKEKQLQRLMARNNYSREEAELRLSHQMPLTDKKSFASLIIDNNGDLITLKEQILDALQRL

SEQ ID NO: 697 - protein, 181 aa, Streptococcus agalactiae
KSTVTKIIRESGFKVIDADQVVHKLQAKGGKLYQALLEWLGPEILDADGELDRPKLSQMIFANPDNMKTSARLQNSIIRQELACQRDQLKQTEEIFFVDIPLLIEEKYIKWFDEIWLVFVDKEKQLQRLMARNNYSREEAELRLSHQMPLTDKKSFASLIINNNGDLITLKEQILDALQRL

SEQ ID NO: 698 - protein, 181 aa, Streptococcus agalactiae
KSTVTKIIRESGFKVIDADQVVHKLQAKGGKLYQALLEWLGPEILDADGELDRPKLSQMIFANPDNMKTSARLQNSIIRQELACQRDQLKQTEEIFFMDIPLLIEEKYIKWFDEIWLVFVDKEKQLQRLMARNNYSREEAELRLSHQMPLTDKKSFASLIIDNNGDLITLKEQILDALQRL

SEQ ID NO: 699 - protein, 181 aa, Streptococcus agalactiae
KSTVTKIIRESGFKVIDADQVVHKLQAKGGKLYQALLEWLGPEILDADGELDRPKLSQMIFANPDNMKTSARLQNSIIRQELACQRDQLKQTEEIFFMDIPLLIEEKYIKWFDEIWLVFVDKEKQLQRLMARNNYSREEAELRLSHQIPLTDKKSFASLIIDNNGDLITLKEQMLDALQRL

SEQ ID NO: 700 - protein, 181 aa, Streptococcus agalactiae; identical to SEQ ID NO: 698

SEQ ID NO: 701 - protein, 181 aa, Streptococcus agalactiae; identical to SEQ ID NO: 698

SEQ ID NO: 702 - protein, 181 aa, Streptococcus agalactiae; identical to SEQ ID NO: 698

SEQ ID NO: 703 - protein, 181 aa, Streptococcus agalactiae; identical to SEQ ID NO: 698

SEQ ID NO: 704 - protein, 181 aa, Streptococcus agalactiae; identical to SEQ ID NO: 697

SEQ ID NO: 705 - protein, 181 aa, Streptococcus agalactiae; identical to SEQ ID NO: 699

SEQ ID NO: 706 - protein, 181 aa, Streptococcus agalactiae; identical to SEQ ID NO: 699

SEQ ID NO: 707 - DNA, 1743 bp, Streptococcus agalactiae
atgttgatggtgttgttattccaaaggctaggaattattatgattttagcctttttattggtaaataatagttattttagacagttaattgaagagcggtctaaacgtgaaacggtagtccttgtcatcattttcggcttgtttgttattatatctaatataacaggaattgaaataaaaggggatcgaagtttggtcgagcgcccttttctaacaacgatttctcattctgactcacttgctaatacaaggactttagttattacaacggcaagtttggttggtggacctctggttggatcaattgttggttttattggaggagttcatcgcttttttcaaggaagcttttcaggttctttctatattgtcagttcagttctagtcggcattgttagcggaaagattggtgataagcttaaggaaaaccatctctacccttcaacaagccaagttattttaattagtattattgccgaaagtatccagatgctatttgttggcatttttacaggatgggaacttgtcaaaatgattgtcattccaatgatgattttaaatagtttaggttccacacttttccttgcgattttgaaaacttatttgtcaaatgaaagtcagttacgcgcagttcaaacgagagatgttcttgaattgactcgacagactctgccctaccttagacaaggtttgacaccgcaatctgctaggagcgtttgcgaaattataaagaggcatactaactttgatgctgtgggattaacagatcggtcaaacgtattagctcatattggtgttggccatgatcaccatattgcaggacaaccggtcaaaacagacttatctaaaagtgttatttttgatggcgaaccaagaattgcgcaagataaagcggcgatttcttgtccagatcacaactgtcagttaaattctgctattgtagttcctctaaaaataaatgataaaactgtgggtgccttaaaaatgtactttgcaggagataagacaatgtctgaggtggaggaaaacctagtccttggtttagcgcaaatattttcaggacaactggcaatggggataacagaggaacaaaataagttagccagtatggcagagataaaggctttacaagcacaaatcaaccctcatttcttctttaatgccattaacacaattagtgcattaatccgtattgattctgataaagcacgttatgcactgatgcagttaagtactttttttagaacaagtttgcagggtggtcaggatcgtgaggtaacgcttgagcaagaaaaatcacatgtggatgcttatatgaatgttgaaaaattacgtttccctgataaatatcagttatcttatgatattagtgcaccagaaaaaatgaagttaccaccttttggtttacaggtactggtagagaatgcagttcgacatgctttcaaagaacgtaagacggacaaccatatattggttcaaataaagccagatggtcattattattgtgtttctgttagtgacaatggacaaggaatctcagatactatcattgataaattaggtcaagaaacagttgcagagagtaagggtacaggtactgctctagttaatctaaataacaggctgaatttattatatggtagtgtaagttgccttcatttttcgagcgacaagaatggtacaaaagtttggtatcgaatacctaatagaataagggaggatgagcatgaaaattttaattct

SEQ ID NO: 708 - DNA, 1740 bp, Streptococcus agalactiae
ttgatggtgttgttattccaaaggctaggaattattatgattttagcctttttattggtaaataatagttatttcagacagttaattgaagagcggtctaaacgtgaaacggtagtacttgtcatcattttcggcttgtttgttattatatctaatataacaggaattgaaataaaaggggatcgaagtttggtcgagcgcccttttctaacaacgatttcccattctgactcacttgctaatacaaggactttagttattacaacggcaagtttggttggtggacctctggttggatcaattgttggttttattggaggagttcatcgcttttttcaaggaagcttttcaggttctttctatattgtcagttcagttctagtcggcattgttagcggaaagattggtgataagcttaaggaaaaccatctctacccttcaacaagccaagttattttaattagtattattgccgaaagtatccagatgctatttgttggtatttttacaggatgggaacttgtcaaaatgattgtcattccaatgatgattttaaatagtttaggttccacacttttccttgcgattttgaaaacttatttgtcaaatgaaagtcagttacgcgcagttcaaacgagagatgttcttgaattgactcgacagactctgccctacctcagacaaggtttgacaccgcaatctgctaggagcgtttgcgaaattataaagaggcatactaactttgatgctgtaggattaacagatcggtcaaacgtattagctcatattggtgttggccatgatcaccatattgcaggacaaccagtcaaaacagacctatctaaaagtgttatttttgatggcgaaccaagaattgcgcaagataaagcggcgatttcttgtccagatcacaactgtcagttaaattctgctattgtagttcctctaaaaataaatgataaaactgtgggtgccttaaaaatgtactttgcaggagataagacaatgtctgaggtggaggaaaacctagtccttggtttagcgcaaatattttcaggacaactggcaatggggataacagaggaacaaaataagttagccagtatggcagagataaaggctttacaagcacaaatcaaccctcatttcttctttaatgccattaacacaattagtgcattaatccgtattgattctgataaagcacgttatgcactgatgcagttaagtactttttttagaacaagtttgcaaggtggtcaggatcgtgaggtaacgcttgagcaagaaaaatcacatgtggatgcttatatgaatgttgaaaaattacgtttccctgataaatatcagttatcttatgatattagtgcaccagaaaaaatgaagttaccgccttttggtttacaggtactggtagagaatgcagttagacatgctttcaaagaacgtaagacggacaaccatatattggttcaaataaagccagatggtcattattattgtgtttctgttagtgacaatggacaaggaatctcagatactatcattgataaattaggtcaagaaacagttgcagagagtaagggtacaggtactgctctagttaatctaaataacaggctgaatttattatatggtagtgtaagttgccttcatttttcgagcgacaagaatggtacaaaagtttggtatcgaatacctaatagaataagggaggatgagcatgaaaattttaattct

SEQ ID NO: 709 - DNA, 1740 bp, Streptococcus agalactiae
ttgatggtgttgttattccaaaggctaggaattattatgattttagcctttttattggtaaataatagttatttcagacagttaattgaagagcggtctaaacgtgaaacggtagtccttgtcatcattttcggcttgtttgttattatatctaatataacaggaattgaaataaaaggggatcgaagtttggtcgagcgcccttttctaacaacgatttctcattctgactcacttgctaatacaaggactttagttattacaacggcaagtttggttggtggacctctggttggatcaattgttggttttattggaggagttcatcgcttttttcaaggaagcttttcaggttctttctatattgtcagttcagttctagtcggcattgttagcggaaagattggtgataagcttaaggaaaaccatctctacccttcaacaagccaagttattttaattagtattattgccgaaagtatccagatgctatttgttggcatttttacaggatgggaacttgtcaaaatgattgtcattccaatgatgattttaaatagtttaggttccacacttttccttgcgattttgaaaacttatttgtcaaatgaaagtcagttacgcgcagttcaaacgagagatgttcttgaattgactcgacagactctgccctaccttagacaaggtttgacaccgcaatctgctaggagcgtttgcgaaattataaagaggcatactaactttgatgctgtgggattaacagatcggtcaaacgtattagctcatattggtgttggccatgatcaccatattgcaggacaaccggtcaaaacagacttatctaaaagtgttatttttgatggcgaaccaagaattgcgcaagataaagcggcgatttcttgtccagatcacaactgtcagttaaattctgctattgtagttcctctaaaaataaatgataaaactgtgggtgccttaaaaatgtactttgcaggagataagacaatgtctgaggtggaggaaaacctagtccttggtttagcgcaaatattttcaggacaactggcaatggggataacagaggaacaaaataagttagccagtatggcagagataaaggctttacaagcacaaatcaaccctcatttcttctttaatgccattaacacaattagtgcattaatccgtattgattctgataaagcacgttatgcactgatgcagttaagtactttttttagaacaagtttgcagggtggtcaggatcgtgaggtaacgcttgagcaagaaaaatcacatgtggatgcttatatgaatgttgaaaaattacgtttccctgataaatatcagttatcttatgatattagtgcaccagaaaaaatgaagttaccaccttttggtttacaggtactggtagagaatgcagttcgacatgctttcaaagaacgtaagacggacaaccatatattggttcaaataaagccagatggtcattattattgtgtttctgttagtgacaatggacaaggaatctcagatactatcattgataaattaggtcaagaaacagttgcagagagtaagggtacaggtactgctctagttaatctaaataacaggctgaatttattatatggtagtgtaagttgccttcatttttcgagcgacaagaatggtacaaaagtttggtatcgaatacctaatagaataagggaggatgagcatgaaaattttaattct

SEQ ID NO: 710 - DNA, 1740 bp, Streptococcus agalactiae; identical to SEQ ID NO: 709

SEQ ID NO: 711 - DNA, 1740 bp, Streptococcus agalactiae
ttgatggtgttgttattccaaaggctaggaattattatgattttagcctttttattggtaaataatagttattttagacagttaattgaagagcggtctaaacgtgaaacggtagtccttgtcatcattttcggcttgtttgttattatatctaatataacaggaattgaaataaaaggggatcgaagtttggtcgagcgcccttttctaacaacgatttctcattctgactcacttgctaatacaaggactttagttattacaacggcaagtttggttggtggacctctggttggatcaattgttggttttattggaggagttcatcgcttttttcaaggaagcttttcaggttctttctatattgtcagttcagttctagtcggcattgttagcggaaagattggtgataagcttaaggaaaaccatctctacccttcaacaagccaagttattttaattagtattattgccgaaagtatccagatgctatttgttggcatttttacaggatgggaacttgtcaaaatgattgtcattccaatgatgattttaaatagtttaggttccacacttttccttgcgattttgaaaacttatttgtcaaatgaaagtcagttacgcgcagttcaaacgagagatgttcttgaattgactcgacagactctgccctaccttagacaaggtttgacaccgcaatctgctaggagcgtttgcgaaattataaagaggcatactaactttgatgctgtgggattaacagatcggtcaaacgtattagctcatattggtgttggccatgatcaccatattgcaggacaaccggtcaaaacagacttatctaaaagtgttatttttgatggcgaaccaagaattgcgcaagataaagcggcgatttcttgtccagatcacaactgtcagttaaattctgctattgtagttcctctaaaaataaatgataaaactgtgggtgccttaaaaatgtactttgcaggagataagacaatgtctgaggtggaggaaaacctagtccttggtttagcgcaaatattttcaggacaactggcaatggggataacagaggaacaaaataagttagccagtatggcagagataaaggctttacaagcacaaatcaaccctcatttcttctttaatgccattaacacaattagtgcattaatccgtattgattctgataaagcacgttatgcactgatgcagttaagtactttttttagaacaagtttgcagggtggtcaggatcgtgaggtaacgcttgagcaagaaaaatcacatgtggatgcttatatgaatgttgaaaaattacgtttccctgataaatatcagttatcttatgatattagtgcaccagaaaaaatgaagttaccaccttttggtttacaggtactggtagagaatgcagttcgacatgctttcaaagaacgtaagacggacaaccatatattggttcaaataaagccagatggtcattattattgtgtttctgttagtgacaatggacaaggaatctcagatactatcattgataaattaggtcaagaaacagttgcagagagtaagggtacaggtactgctctagttaatctaaataacaggctgaatttattatatggtagtgtaagttgccttcatttttcgagcgacaagaatggtacaaaagtttggtatcgaatacctaatagaataagggaggatgagcatgaaaattttaattct

SEQ ID NO: 712 - DNA, 1740 bp, Streptococcus agalactiae
ttgatggtgttgttattccaaaggctaggaattattatgattttagcctttttattggtaaataatagttatttcagacagttaattgaagagcggtctaaacgtgaaacggtagtccttgtcatcattttcggcttgtttgttattatatctaatataacaggaattgaaataaaaggggatcgaagtttggtcgagcgcccttttctaacaacgatttcccattctgactcacttgctaatacaaggactttagttattacaacggcaagtttggttggtggacctctggttggatcaattgttggttttattggaggagttcatcgcttttttcaaggaagcttttcaggttctttctatattgtcagttcagttctagtcggcattgttagcggaaagattggtgataagcttaaggaaaaccatctctacccttcaacaagccaagttattttaattagtattattgccgaaagtatccagatgctatttgttggcatttttacaggatgggaacttgtcaaaatgattgtcattccaatgatgattttaaatagtttaggttccacacttttccttgcgattttgaaaacttatttgtcaaatgaaagtcagttacgcgcagttcaaacgagagatgttcttgaattgactcgacagactctgccctaccttagacaaggtttgacaccgcaatctgctaggagcgtttgcgaaattataaagaggcatactaactttgatgctgtgggattaacagatcggtcaaacgtattagctcatattggtattggccatgatcaccatattgcaggacaaccggtcaaaacagacttatctaaaagtgttatttttgatggcgaaccaagaattgcgcaagataaagcggcgatttcttgtccagatcacaactgtcagttaaattctgctattgtagttcctctaaaaataaatgataaaactgtgtgtgccttaaaaatgtactttgcaggagataagacaatgtctgaggtggaggaaaacctagtccttggtttagcgcaaatattttcaggacaactggcaatggggataacagaggaacaaaataagttagccagtatggcagagataaaggctttacaagcacaaatcaaccctcatttcttctttaatgccattaacacaattagtgcattaatccgtattgattctgataaagcacgttatgcactgatgcagttaagtactttttttagaacaagtttgcaaggtggtcaggatcgtgaggtaacgcttgagcaagaaaaatcacatgtggatgcttatatgaatgttgaaaaattacgtttccctgataaatatcagttatcttatgatattagtgcaccagaaaaaatgaagttaccgccttttggtttacaggtactggtagagaatgcagttcgacatgctttcaaagaacgtaagacggacaaccatatattggttcaaataaagccagatggtcattattattgtgtttctgttagtgacaatggacaaggaatctcagatactatcattgataaattaggtcaagaaacagttgcagagagtaaggggacaggtactgctctagttaatctaaataacaggctgaatttattatatggtagtgtaagttgccttcatttttcgagcgacaagaatggtacaaaagtttggtatcgaatacctaatagaataagggaggatgagcatgaaaattttaattct

SEQ ID NO: 713 - DNA, 1740 bp, Streptococcus agalactiae
ttgatggtgttgttattccaaaggctaggaattattatgattttagcctttttattggtaaataatagttatttcagacagttaattgaagagcggtctaaacgtgaaacggtagtccttgtcatcattttcggcttgtttgttattatatctaatataacaggaattgaaataaaaggggatcgaagtttggtcgagcgcccttttctaacaacgatttcccattctgactcacttgctaatacaaggactttagttattacaacggcaagtttggttggtggacctctggttggatcaattgttggttttattggaggagttcatcgcttttttcaaggaagcttttcaggttctttctatattgtcagttcagttctagtcggcattgttagcggaaagattggtgataagcttaaggaaaaccatctctacccttcaacaagccaagttattttaattagtattattgccgaaagtatccagatgctatttgttggcatttttacaggatgggaacttgtcaaaatgattgtcattccaatgatgattttaaatagtttaggttccacacttttccttgcgattttgaaaacttatttgtcaaatgaaagtcagttacgcgcagttcaaacgagagatgttcttgaattgactcgacagactctgccctaccttagacaaggtttgacaccgcaatctgctaggagcgtttgcgaaattataaagaggcatactaactttgatgctgtgggattaacagatcggtcaaacgtattagctcatattggtgttggccatgatcaccatattgcaggacaaccggtcaaaacagacttatctaaaagtgttatttttgatggcgaaccaagaattgcgcaagataaagcggcgatttcttgtccagatcacaactgtcagttaaattctgctattgtagttcctctaaaaataaatgataaaactgtgtgtgccttaaaaatgtactttgcaggagataagacaatgtctgaggtggaggaaaacctagtccttggtttagcgcaaatattttcaggacaactggcaatggggataacagaggaacaaaataagttagccagtatggcagagataaaggctttacaagcacaaatcaaccctcatttcttctttaatgccattaacacaattagtgcattaatccgtattgattctgataaagcacgttatgcactgatgcagttaagtactttttttagaacaagtttgcaaggtggtcaggatcgtgaggtaacgcttgagcaagaaaaatcacatgtggatgcttatatgaatgttgaaaaattacgtttccctgataaatatcagttatcttatgatattagtgcaccagaaaaaatgaagttaccgccttttggtttacaggtactggtagagaatgcagttcgacatgctttcaaagaacgtaagacggacaaccatatattggttcaaataaagccagatggtcattattattgtgtttctgttagtgacaatggacaaggaatctcagatactatcattgataaattaggtcaagaaacagttgcagagagtaaggggacaggtactgctctagttaatctaaataacaggctgaatttattatatggtagtgtaagttgccttcatttttcgagcgacaagaatggtacaaaagtttggtatcgaatacctaatagaataagggaggatgagcatgaaaattttaattct

SEQ ID NO: 714 - DNA, 1740 bp, Streptococcus agalactiae; identical to SEQ ID NO: 713

SEQ ID NO: 715 - DNA, 1740 bp, Streptococcus agalactiae
ttgatggtgttgttattccaaaggctaggaattattatgattttagcctttttattggtaaataatagttatttcagacagttaattgaagagcggtctaaacgtgaaacggtagtacttgtcatcattttcggcttgtttgttattatatctaatataacaggaattgaaataaaaggggatcgaagtttggtcgagcgcccttttctaacaacgatttcccattctgactcacttgctaatacaaggactttagttattacaacggcaagtttggttggtggacctctggttggatcaattgttggttttattggaggagttcatcgcttttttcaaggaagcttttcaggttctttctatattgtcagttcagttctagtcggcattgttagcggaaagattggtgataagcttaaggaaaaccatctctacccttcaacaagccaagttattttaattagtattattgccgaaagtatccagatgctatttgttggtatttttacaggatgggaacttgtcaaaatgattgtcattccaatgatgattttaaatagtttaggttccacacttttccttgcgattttgaaaacttatttgtcaaatgaaagtcagttacgcgcagttcaaacgagagatgttcttgaattgactcgacagactctgccctacctcagacaaggtttgacaccgcaatctgctaggagcgtttgcgaaattataaagaggcatactaactttgatgctgtaggattaacagatcggtcaaacgtattagctcatattggtgttggccatgatcaccatattgcaggacaaccagtcaaaacagacctatctaaaagtgttatttttgatggcgaaccaagaattgcgcaagataaagcggcgatttcttgtccagatcacaactgtcagttaaattctgctattgtagttcctctaaaaataaatgataaaactgtgggtgccttaaaaatgtactttgcaggagataagacaatgtctgaggtggaggaaaacctagtccttggtttagcgcaaatattttcaggacaactggcaatggggataacagaggaacaaaataagttagccagtatggcagagataaaggctttacaagcacaaatcaaccctcattttttctttaatgccattaacacaattagtgcattaatccgtattgattctgataaagcacgttatgcactgatgcagttaagtactttttttagaacaagtttgcaaggtggtcaggatcgtgaggtaacgcttgagcaagaaaaatcacatgtggatgcttatatgaatgttgaaaaattacgtttccctgataaatatcagttatcttatgatattagtgcaccagaaaaaatgaagttaccgccttttggtttacaggtactggtagagaatgcagttagacatgctttcaaagaacgtaagacggacaaccatatattggttcaaataaagccagatggtcattattattgtgtttctgttagtgacaatggacaaggaatctcagatactatcattgataaattaggtcaagaaacagttgcagagagtaagggtacaggtactgctctagttaatctaaataacaggctgaatttattatatggtagtgtaagttgccttcatttttcgagcgacaagaatggtacaaaagtttggtatcgaatacctaatagaataagggaggatgagcatgaaaattttaattct

SEQ ID NO: 716 - DNA, 1740 bp, Streptococcus agalactiae
ttgatggtgttgttattccaaaggctaggaattattatgattttagcctttttattggtaaataatagttatttcagacagttaattgaagagcggtctaaacgtgaaacggtagtacttgtcatcattttcggcttgtttgttattatatctaatataacaggaattgaaataaaaggggatcgaagtttggtcgagcgcccttttctaacaacgatttctcattctgactcacttgctaatacaaggactttagttattacaacggcaagtttggttggtggacctctggttggatcaattgttggttttattggaggagttcatcgcttttttcaaggaagcttttcaggttctttctatattgtcagttcagttctagtcggcattgtgagcggaaagattggtgataagcttaaggaaaaccatctctacccttcaacaagccaagttattttaattagtattattgccgaaagtatccagatgctatttgttggcatttttacaggatgggaacttgtcaaaatgattgtcattccaatgatgattttaaatagtttaggttccacacttttccttgcgattttgaaaacttatttgtcaaatgaaagtcagttacgcgcagttcaaacgagagatgttcttgaattgactcgacagactctgccctaccttagacaaggtttgacaccgcaatctgctaggagcgtttgcgaaattataaagaggcatactaattttgatgctgtgggattaacagatcggtcaaacgtattagctcatattggtgttggccatgatcaccatattgcaggacaaccagtcaaaacagacctatctaaaagtgttatttttgatggcgaaccaagaattgcgcaagataaagcggcgatttcttgtccagatcacaactgtcagttaaattctgctattgtagttcctctaaaaataaatgataaaactgtgggtgccttaaaaatgtactttgcaggagataagacaatgtctgaggtggaggaaaacctagtccttggtttagcgcaaatattttcaggacaactggcaatggggataacagaggaacaaaataagttagccagtatggcagagataaaggctttacaagcacaaatcaaccctcatttcttctttaatgccattaacacaattagtgcattaatccgtattgattctgataaagcacgttatgcactgatgcagttaagtactttttttagaacaagtttgcaaggtggtcaggatcgtgaggtaacgcttgagcaagaaaaatcacatgtggatgcttatatgaatgttgaaaaattacgtttccctgataaatatcagttatcttatgatattagtgcaccagaaaaaatgaagttaccgccttttggtttacaggtactggtagagaatgcagttcgacatgcttttaaagaacgtaagacggacaaccatatattggttcaaataaagccagatggtcattattattgtgtttctgttagtgacaatggacaaggaatctcagatactatcattgataaattaggtcaagaaacagttgcagagagtaagggtacaggtactgctctagttaatctaaataacaggctgaatttattatatggtagtgtaagttgccttcatttttcgagcgacaagaatggtacaaaagtttggtatcgaatacctaatagaataagggaggatgagcatgaaaattttaattct

SEQ ID NO: 717 - DNA, 1740 bp, Streptococcus agalactiae; identical to SEQ ID NO: 709

SEQ ID NO: 718 - protein, 580 aa, Streptococcus agalactiae
LMVLLFQRLGIIMILAFLLVNNSYFRQLIEERSKRETVVLVIIFGLFVIISNITGIEIKGDRSLVERPFLTTISHSDSLANTRTLVITTASLVGGPLVGSIVGFIGGVHRFFQGSFSGSFYIVSSVLVGIVSGKIGDKLKENHLYPSTSQVILISIIAESIQMLFVGIFTGWELVKMIVIPMMILNSLGSTLFLAILKTYLSNESQLRAVQTRDVLELTRQTLPYLRQGLTPQSARSVCEIIKRHTNFDAVGLTDRSNVLAHIGVGHDHHIAGQPVKTDLSKSVIFDGEPRIAQDKAAISCPDHNCQLNSAIVVPLKINDKTVGALKMYFAGDKTMSEVEENLVLGLAQIFSGQLAMGITEEQNKLASMAEIKALQAQINPHFFFNAINTISALIRIDSDKARYALMQLSTFFRTSLQGGQDREVTLEQEKSHVDAYMNVEKLRFPDKYQLSYDISAPEKMKLPPFGLQVLVENAVRHAFKERKTDNHILVQIKPDGHYYCVSVSDNGQGISDTIIDKLGQETVAESKGTGTALVNLNNRLNLLYGSVSCLHFSSDKNGTKVWYRIPNRIREDEHENFNS

SEQ ID NO: 719 - protein, 580 aa, Streptococcus agalactiae; identical to SEQ ID NO: 718

SEQ ID NO: 720 - protein, 580 aa, Streptococcus agalactiae; identical to SEQ ID NO: 718

SEQ ID NO: 721 - protein, 580 aa, Streptococcus agalactiae; identical to SEQ ID NO: 718

SEQ ID NO: 722 - protein, 580 aa, Streptococcus agalactiae; identical to SEQ ID NO: 718

SEQ ID NO: 723 - protein, 580 aa, Streptococcus agalactiae
LMVLLFQRLGIIMILAFLLVNNSYFRQLIEERSKRETVVLVIIFGLFVIISNITGIEIKGDRSLVERPFLTTISHSDSLANTRTLVITTASLVGGPLVGSIVGFIGGVHRFFQGSFSGSFYIVSSVLVGIVSGKIGDKLKENHLYPSTSQVILISIIAESIQMLFVGIFTGWELVKMIVIPMMILNSLGSTLFLAILKTYLSNESQLRAVQTRDVLELTRQTLPYLRQGLTPQSARSVCEIIKRHTNFDAVGLTDRSNVLAHIGIGHDHHIAGQPVKTDLSKSVIFDGEPRIAQDKAAISCPDHNCQLNSAIVVPLKINDKTVCALKMYFAGDKTMSEVEENLVLGLAQIFSGQLAMGITEEQNKLASMAEIKALQAQINPHFFFNAINTISALIRIDSDKARYALMQLSTFFRTSLQGGQDREVTLEQEKSHVDAYMNVEKLRFPDKYQLSYDISAPEKMKLPPFGLQVLVENAVRHAFKERKTDNHILVQIKPDGHYYCVSVSDNGQGISDTIIDKLGQETVAESKGTGTALVNLNNRLNLLYGSVSCLHFSSDKNGTKVWYRIPNRIREDEHENFNS

SEQ ID NO: 724 - protein, 580 aa, Streptococcus agalactiae
LMVLLFQRLGIIMILAFLLVNNSYFRQLIEERSKRETVVLVIIFGLFVIISNITGIEIKGDRSLVERPFLTTISHSDSLANTRTLVITTASLVGGPLVGSIVGFIGGVHRFFQGSFSGSFYIVSSVLVGIVSGKIGDKLKENHLYPSTSQVILISIIAESIQMLFVGIFTGWELVKMIVIPMMILNSLGSTLFLAILKTYLSNESQLRAVQTRDVLELTRQTLPYLRQGLTPQSARSVCEIIKRHTNFDAVGLTDRSNVLAHIGVGHDHHIAGQPVKTDLSKSVIFDGEPRIAQDKAAISCPDHNCQLNSAIVVPLKINDKTVCALKMYFAGDKTMSEVEENLVLGLAQIFSGQLAMGITEEQNKLASMAEIKALQAQINPHFFFNAINTISALIRIDSDKARYALMQLSTFFRTSLQGGQDREVTLEQEKSHVDAYMNVEKLRFPDKYQLSYDISAPEKMKLPPFGLQVLVENAVRHAFKERKTDNHILVQIKPDGHYYCVSVSDNGQGISDTIIDKLGQETVAESKGTGTALVNLNNRLNLLYGSVSCLHFSSDKNGTKVWYRIPNRIREDEHENFNS

SEQ ID NO: 725 - protein, 580 aa, Streptococcus agalactiae; identical to SEQ ID NO: 724

SEQ ID NO: 726 - protein, 580 aa, Streptococcus agalactiae; identical to SEQ ID NO: 718

SEQ ID NO: 727 - protein, 580 aa, Streptococcus agalactiae; identical to SEQ ID NO: 718

SEQ ID NO: 728 - protein, 580 aa, Streptococcus agalactiae; identical to SEQ ID NO: 718

SEQ ID NO: 729 - DNA, 705 bp, Streptococcus agalactiae
atgaataaaagaagaaaattatcaaaattgaatgtaaaaaaacatcatttagcttatggagctatcactttagtagcccttttttcatgtattttggctgtaatggtcatctttaaaagttcacaagttactactgaatctttgtcaaaagcagataaagttcgcgtagccaaaaaatcaaaaatgactaaggcgacatctaaatcaaaagtagaagatgtaaaacaggctccaaaaccttctcaggcatctaatgaagccccaaaatcaagttctcaatctacagaagctaattctcagcaacaagttactgcgagtgaagaggcagctgtagaacaagcagttgtaacagaaaacacccctgctaccagtcaggcacaacaagcttatgctgttactgagacaacttatagacctgctcaacaccagacgagtggccaagtattgagtaatggaaatactgcaggggctattggctcagcagctgcagcacaaatggctgctgcaacaggagtccctcagtctacttgggaacatattattgcccgtgaatcaaatggtaatcctaatgttgctaatgcctcaggagcttcaggacttttccaaacgatgccaggttggggttcaacagctacagttcaggatcaagttaattcagctattaaagcttatcgtgctcaaggtttatcagcttggggttactag

SEQ ID NO: 730 - DNA, 558 bp, Streptococcus agalactiae
aaaagttcacaagttactactgaatctttgtcaaaagcagataaagttcgcgtagccaaaaaatcaaaaatgaataaggcaacatctaaatcaaaagtagaaggtgtaaaacaggctccaaaaccaagttctcaatctacagaagctaattctcagcaacaagttactgcgagtgaagaggcagctgtagaacaagcagttgtaacagaaaatacccctgctaccagtcaagcacaacaagcttatgctgttactgagacaacttatagacctgctcaacaccagccgagtggccaagtattgagcaatggaaatactgcaggggttattggctcagcagcagcagcacaaatggctgctgcaacgggagttcctcagtctacttgggaacatattattgcccgtgaatcaaatggtaatcctaacgttgctaatgcctcaggagcttcaggacttttccaaacgatgccaggttggggttcaacagctacagttcaggatcaagttaattcagctattaaagcttatcgtgctcaaggtttatcagcttggggttac

SEQ ID NO: 731 - DNA, 588 bp, Streptococcus agalactiae; identical to SEQ ID NO: 307

SEQ ID NO: 732 - DNA, 588 bp, Streptococcus agalactiae; identical to SEQ ID NO: 308

SEQ ID NO: 733 - DNA, 478 bp, Streptococcus agalactiae; identical to SEQ ID NO: 310

SEQ ID NO: 734 - DNA, 501 bp, Streptococcus agalactiae; identical to SEQ ID NO: 311

SEQ ID NO: 735 - DNA, 566 bp, Streptococcus agalactiae; identical to SEQ ID NO: 312

SEQ ID NO: 736 - DNA, 588 bp, Streptococcus agalactiae; identical to SEQ ID NO: 313

SEQ ID NO: 737 - DNA, 556 bp, Streptococcus agalactiae; identical to SEQ ID NO: 314

SEQ ID NO: 738 - DNA, 587 bp, Streptococcus agalactiae; identical to SEQ ID NO: 315

SEQ ID NO: 739 - DNA, 564 bp, Streptococcus agalactiae
tctttgtcaaaagcagataaagttcgcgtagccaaaaaatcaaaaatgactaaggcgacatctaaatcaaaagtagaagatgtaaaacaggctccaaaaccttctcaggcatctaatgaagccccaaaatcaagttctcaatctacagaagctaattctcagcaacaagttactgcgagtgaagaggcggctgtagaacaagcagttgtaacagaaaatacccctgctaccagtcaggcacaacaaacttatgctgttactgagacaacttacaaacctgctcaacaccagacaagtggccaagtattgagcaatggaaatactgcaggggcggtcggatctgctgctgcagcacaaatggctgctgcaacaggagtccctcagtctacttgggaacatattattgcccgtgaatcaaatggtaatcctaatgttgctaatgcctcaggagcttcaggacttttccaaacgatgccaggttggggttcaacagctacagttcaggatcaagttaattcagctattaaagcttatcgtgctcaaggtttatcagcttggggttac

SEQ ID NO: 740 - protein, 234 aa, Streptococcus agalactiae
MNKRRKLSKLNVKKHHLAYGAITLVALFSCILAVMVIFKSSQVTTESLSKADKVRVAKKSKMTKATSKSKVEDVKQAPKPSQASNEAPKSSSQSTEANSQQQVTASEEAAVEQAVVTENTPATSQAQQAYAVTETTYRPAQHQTSGQVLSNGNTAGAIGSAAAAQMAAATGVPQSTWEHIIARESNGNPNVANASGASGLFQTMPGWGSTATVQDQVNSAIKAYRAQGLSAWGY

SEQ ID NO: 741 - protein, 196 aa, Streptococcus agalactiae; identical to SEQ ID NO: 317

SEQ ID NO: 742 - protein, 196 aa, Streptococcus agalactiae; identical to SEQ ID NO: 318

SEQ ID NO: 743 - protein, 196 aa, Streptococcus agalactiae; identical to SEQ ID NO: 318

SEQ ID NO: 744 - protein, 158 aa, Streptococcus agalactiae; identical to SEQ ID NO: 320

SEQ ID NO: 745 - protein, 167 aa, Streptococcus agalactiae; identical to SEQ ID NO: 321

SEQ ID NO: 746 - protein, 188 aa, Streptococcus agalactiae; identical to SEQ ID NO: 322

SEQ ID NO: 747 - protein, 196 aa, Streptococcus agalactiae; identical to SEQ ID NO: 323

SEQ ID NO: 748 - protein, 185 aa, Streptococcus agalactiae; identical to SEQ ID NO: 324

SEQ ID NO: 749 - protein, 195 aa, Streptococcus agalactiae; identical to SEQ ID NO: 325

SEQ ID NO: 750 - protein, 188 aa, Streptococcus agalactiae; identical to SEQ ID NO: 326

SEQ ID NO: 751 - protein, 186 aa, Streptococcus agalactiae
KSSQVTTESLSKADKVRVAKKSKMNKATSKSKVEGVKQAPKPSSQSTEANSQQQVTASEEAAVEQAVVTENTPATSQAQQAYAVTETTYRPAQHQPSGQVLSNGNTAGVIGSAAAAQMAAATGVPQSTWEHIIARESNGNPNVANASGASGLFQTMPGWGSTATVQDQVNSAIKAYRAQGLSAWGY

SEQ ID NO: 752 - DNA, 1035 bp, Streptococcus agalactiae
atgaaagaaaaacagtcgaaaaggcttatttatatactactggttgtttccattatttttataagtgtttttacatacagtattagccagccttctaaactacttccaccaaaagaattagttattctaagtccaaatagtcaagccattttaacaggaacgattccagcttttgaggaaaaatacggtataaaagttaagcttattcaaggtgggacagggcaactaatagatagattaagtaaggagggtaagcagttgaaggcggatattttctttggaggaaattatacgcaatttgaaagtcataaggcattgtttgagtcttacgtatcaaagaatgttcatactgttattccagactatatccatccaagtgatacggcgacaccttatactataaatgggagtgtcttgattgtaaataacgaattagctaagggacttaccatcaagagttatgaagatttattacagccttccttaaaaggtaaaattgcctttgcagatccgaatacttcctctagtgctttctcacaactcactaatatactcttggccaagggtggttacaccaatccaaaagcgtggaactatgttaaaaagctacaacataatattaatgctatcaaatcttctagctcttcagaagtttatcaatcagttgcagaaggaaaaatgattgtggggctgacttacgaagaccctagtgtcaatttgcaaaaaagtggtgccaatgtttctattgtatatccgacagaagggacagtttttgtcccatcttcggttgcaattataaagaatgctccttctatgaaagaagcaaagttatttattaattttatgctttctttagatgttcaaaatgcctttgggcagtcaacgagtaaccgacctattcgtaaagatgcccaaacgagtaatggcatgaaagctttaaaggatattgctactcttaaagaagattatcgctatgtcactaagcataagggccaaatccttaaaacctataatcgtattcgtagaaatgctgat

SEQ ID NO: 753 - DNA, 948 bp, Streptococcus agalactiae
cagccttctaaactacttccaccaaaagaattagttattctaagtccaaatagtcaagccattttaacaggaacgattccagcttttgaggaaaaatacggtataaaagttaagcttattcaaggtgggacagggcaactaatagatagattaagtaaggagggtaagcagttgaaggcggatattttctttggaggaaattatacgcaatttgaaagtcataaggcattgtttgagtcttacgtatcaaagaatgttcatactgttattccagactatatccatccaagtgatacggcgacaccttatactataaatgggagtgtcttgattgtaaataacgaattagctaagggacttaccatcaagagttatgaagatttattacagccttccttaaaaggtaaaattgcctttgcagatccgaatacttcctctagtgctttctcacaactcactaatatactcttggccaagggtggttacaccaatccaaaagcgtggaactatgttaaaaagctacaacataatattaatgctatcaaatcttctagctcttcagaagtttatcaatcagttgcagaaggaaaaatgattgtggggctgacttacgaagaccctagtgtcaatttgcaaaaaagtggtgccaatgtttctattgtatatccgacagaagggacagtttttgtcccatcttcggttgcaattataaagaatgctccttctatgaaagaagcaaagttatttattaattttatgctttctttagatgttcaaaatgcctttgggcagtcaacgagtaaccgacctattcgtaaagatgcccaaacgagtaatggcatgaaagctttaaaggatattgctactcttaaagaagattatcgctatgtcactaagcataagggccaaatccttaaaacctataatcgtattcgtagaaatgctgat

SEQ ID NO: 754 - DNA, 948 bp, Streptococcus agalactiae
cagccttctaaactacttccaccaaaagaattagttattctaagtccaaatagtcaagccattttaacaggaacgattccagcttttgaggaaaaatacggtataaaagttaagcttattcaaggtgggacaggtcaactaatagatagattaagtaaggagggtaagcagttgaaggcggatattttctttggaggaaattatacgcaatttgaaagtcataaggcattgtttgagtcttacgtatcaaagaatattcatactgttattccagattatatccatccgagtgatacggcgacaccttatactataaatgggagtgtcttgattgtaaataacgaattagctaagggacttaccatcaagagttatgaagatttattacagccttccttaaaaggtaaaattgcctttgcagatccgaatacttcctctagtgctttctcacaactcactaatatactcttggccaagggtggttacaccaatccaaaagcgtggaactatgttaaaaagctacaacataatattaatgctatcaaatcttctagctcttcagaagtttatcaatcagttgcagaaggaaaaatgattgtggggttgacttacgaagaccctagtgtcaatttgcaaaaaagtggtgccaatgtttctattgtatatccgacagaagggacagtttttgtcccatcttcggttgcaattataaagaatgctccttctatgaaagaagcaaagttatttattaattttatgctttctttagatgttcaaaatgcctttgggcagtcaacgagtaaccgacctattcgtaaagatgcccaaacgagtaatggcatgaaagctttaaaggatattgctactcttaaagaagattatcgctatgtcactaagcataagggccaaatccttaaaacctataatcgtattcgtagaaatgctgat

SEQ ID NO: 755 - DNA, 940 bp, Streptococcus agalactiae
taaactacttccaccaaaagaattagttattctaagtccaaatagtcaagccattttaacaggaacgattccagcttttgaggaaaaatacggtataaaagttaagcttattcaaggtgggacaggtcaactaatagatagattaagtaaggagggtaagcagttgaaggcggatattttctttggaggaaattatacgcaatttgaaagtcataaggcattgtttgagtcttacgtatcaaagaatattcatactgttattccagattatatccatccgagtgatacggcgacaccttatactataaatgggagtgtcttgattgtaaataacgaattagttaagggacttaccatcaagagttatgaagatttattacagccttccttaaaaggtaaaattgcctttgcagatccgaatacttcctctagtgctttctcacaactcactaatatactcttggccaagggtggttacaccaatccaaaagcgtggaactatgttaaaaagctacaacataatattaatgctatcaaatcttctagctcttcagaagtttatcaatcagttgcagaaggaaaaatgattgtggggttgacttacgaagaccctagtgtcaatttgcaaaaaagtggtgccaatgtttctattgtatatccgacagaagggacagtttttgtcccatcttcggttgcaattataaagaatgctccttctatgaaagaagcaaagttatttattaattttatgctttctttagatgttcaaaatgcctttgggcagtcaacgagtaaccgacctattcgtaaagatgcccaaacgagtaatggcatgaaagctttaaaggatattgctactcttaaagaagattatcgctatgtcactaagcataagggccaaatccttaaaacctataatcgtattcgtagaaatgctgat

SEQ ID NO: 756 - DNA, 948 bp, Streptococcus agalactiae; identical to SEQ ID NO: 753

SEQ ID NO: 757 - DNA, 948 bp, Streptococcus agalactiae
cagccttctaaactacttccaccaaaagaattagttattctaagtccaaatagtcaagccattttaacaggaacgattccagcttttgaggaaaaatacggtataaaagttaagcttattcaaggtgggacagggcaactaatagatagattaagtaaggagggtaagcagttgaaggcggatattttctttggaggaaattatacgcaatttgaaagtcataaggcattgtttgagtcttacgtatcaaagaatgttcatactgttattccagactatatccatccgagtgatacggcgacaccttatactataaatgggagtgtcttgattgtaaataacgaattagctaagggacttaccatcaagagttatgaagatttattacagccttccttaaaaggtaaaattgcctttgcagatccgaatacttcctctagtgctttctcacaactcactaatatactcttggccaagggtggttacaccaatccaaaagcgtggaactatgttaaaaagctacaacataatattaatgctatcaaatcttctagctcttcagaagtttatcaatcagttgcagaaggaaaaatgattgtggggttgacttacgaagaccctagtgtcaatttgcaaaaaagtggtgccaatgtttctattgtatacccgacagaagggacagtttttgtcccatcttcggttgcaattataaagaatgctccttctatgaaagaagcaaagttatttattaattttatgctttctttagatgttcaaaatgcctttgggcagtcaacgagtaaccgacctattcgtaaagatgcccaaacaagtaatggcatgaaagctttaaaggatatcgctactcttaaagaagattatcgctatgtcactaagcataagagccaaatccttaaaacctataatcgcattcgtagaaatgctgat

SEQ ID NO: 758 - DNA, 948 bp, Streptococcus agalactiae; identical to SEQ ID NO: 757

SEQ ID NO: 759 - DNA, 948 bp, Streptococcus agalactiae; identical to SEQ ID NO: 757

SEQ ID NO: 760 - DNA, 948 bp, Streptococcus agalactiae
cagccttttaaactacttccaccaaaagaattagttattctaagtccaaatagtcaagccattttaacaggaacgattccagcttttgaggaaaaatacggtataaaagttaagcttattcaaggtgggacagggcaactaatagatagattaagtaaggagggtaagcagttgaaggcggatattttctttggaggaaattatacgcaatttgaaagtcataaggcattgtttgagtcttacgtatcaaagaatgttcatactgttattccagactatatccatccaagtgatacggcgacaccttatactataaatgggagtgtcttgattgtaaataacgaattagctaagggacttaccatcaagagttatgaagatttattacagccttccttaaaaggtaaaattgcctttgcagatccgaatacttcctctagtgctttctcacaactcactaatatactcttggccaagggtggttacaccaatccaaaagcgtggaactatgttaaaaagctacaacataatattaatgctatcaaatcttctagctcttcagaagtttatcaatcagttgcagaaggaaaaatgattgtggggctgacttacgaagaccctagtgtcaatttgcaaaaaagtggtgccaatgtttctattgtatatccgacagaagggacagtttttgtcccatcttcggttgcaattataaagaatgctccttctatgaaagaagcaaagttatttattaattttatgctttctttagatgttcaaaatgcctttgggcagtcaacgagtaaccgacctattcgtaaagatgcccaaacgagtaatggcatgaaagctttaaaggatattgctactcttaaagaagattatcgctatgtcactaagcataagggccaaatccttaaaacctataatcgtattcgtagaaatgctgat

SEQ ID NO: 761 - DNA, 899 bp, Streptococcus agalactiae
atagtcaagccattttaacaggaacgattccagcttttgaggaaaaatacggtataaaagttaagcttattcaaggtgggacagggcaactaatagatagattaagtaaggagggtaagcatttgaaggcggatattttctttggaggaaattatacgcaatttgaaagtcataaggcattgtttgagtcttacgtatcaaagaatgttcatactgttattccagactatatccatccaagtgatacggcgacaccttatactataaatgggagtgtcttgattgtaaataacgaattagctaagggacttaccatcaagagttatgaagatttattacagccttccttaaaaggtaaaattgcctttgcagatccgaatacttcctctagtgctttctcacaactcaccaatatactcttggcaaagggtggttacaccaatccaaaagcgtggaactatgttaaaaagctacaacataatattaatgctatcaaatcttctagctcttcagaagtttatcaatcagttgcagaaggaaaaatgattgtggggttgacttacgaagaccctagtgtcaatttgcaaaaaagtggtgccaatgtttctattgtatatccgacagaagggacagtttttgtcccatcttcggttgcaattataaagaatgctccttctatgaaagaagcaaagttatttattaattttatgctttctttagatgttcaaaatgcctttgggcagtcaacgagtaaccgacctattcgtaaagatgcccaaacgagtaatggcatgaaagctttaaaggatattgctactcttaaagaagattatcgctatgtcactaagcataagggccaaatccttaaaacctataatcgtattcgtagaaatgctgat

SEQ ID NO: 762 - DNA, 948 bp, Streptococcus agalactiae
cagccttctaaactacttccaccaaaagaattagttattctaagtccaaatagtcaagccattttaacaggaacgattccagcttttgaggaaaaatacggtataaaagttaagcttattcaaggtgggacagggcaactaatagatagattaagtaaggagggtaagcagttgaaggcggatgttttctttggaggaaattatacgcaatttgaaagtcataaggcattgtttgagtcttacgtatcaaagaatgttcatactgttattccagactatatccatccgagtgatacggcgacaccttatactataaatgggagtgtcttgattgtaaataacgaattagctaagggacttaccatcaagagttatgaagatttattacagccttccttaaaaggtaaaattgcctttgcagatccgaatacttcctctagtgctttctcacaactcaccaatatactcttggcaaagggtggttacaccaatccaaaagcgtggaactatgttaaaaagctacaacataatattaatgctatcaaatcttctagctcttcagaagtttatcaatcagttgcagaaggcaaaatgattgtggggctgacttacgaagaccctagtgtcaatttgcaaaaaagtggtgccaatgtttctattgtgtatccgacagaagggacagtttttgtcccatcttcggttgcaattataaagaatgctccttctatgaaagaagcaaagttatttattaattttatgctttctttagatgttcaaaatgcctttgggcagtcaacgagtaaccgacctattcgtaaagatgcccaaacgagtaatggcatgaaagctttaaaggatattgctactcttaaagaagattatcgctatgtcactaagcataagggccaaatccttaaaacctataatcgtattcgtagaaatgctgat

SEQ ID NO: 763 - protein, 345 aa, Streptococcus agalactiae
MKEKQSKRLIYILLVVSIIFISVFTYSISQPSKLLPPKELVILSPNSQAILTGTIPAFEEKYGIKVKLIQGGTGQLIDRLSKEGKQLKADIFFGGNYTQFESHKALFESYVSKNVHTVIPDYIHPSDTATPYTINGSVLIVNNELAKGLTIKSYEDLLQPSLKGKIAFADPNTSSSAFSQLTNILLAKGGYTNPKAWNYVKKLQHNINAIKSSSSSEVYQSVAEGKMIVGLTYEDPSVNLQKSGANVSIVYPTEGTVFVPSSVAIIKNAPSMKEAKLFINFMLSLDVQNAFGQSTSNRPIRKDAQTSNGMKALKDIATLKEDYRYVTKHKGQILKTYNRIRRNAD

SEQ ID NO: 764 - protein, 316 aa, Streptococcus agalactiae
QPSKLLPPKELVILSPNSQAILTGTIPAFEEKYGIKVKLIQGGTGQLIDRLSKEGKQLKADIFFGGNYTQFESHKALFESYVSKNVHTVIPDYIHPSDTATPYTINGSVLIVNNELAKGLTIKSYEDLLQPSLKGKIAFADPNTSSSAFSQLTNILLAKGGYTNPKAWNYVKKLQHNINAIKSSSSSEVYQSVAEGKMIVGLTYEDPSVNLQKSGANVSIVYPTEGTVFVPSSVAIIKNAPSMKEAKLFINFMLSLDVQNAFGQSTSNRPIRKDAQTSNGMKALKDIATLKEDYRYVTKHKGQILKTYNRIRRNAD

SEQ ID NO: 765 - protein, 316 aa, Streptococcus agalactiae
QPSKLLPPKELVILSPNSQAILTGTIPAFEEKYGIKVKLIQGGTGQLIDRLSKEGKQLKADIFFGGNYTQFESHKALFESYVSKNIHTVIPDYIHPSDTATPYTINGSVLIVNNELAKGLTIKSYEDLLQPSLKGKIAFADPNTSSSAFSQLTNILLAKGGYTNPKAWNYVKKLQHNINAIKSSSSSEVYQSVAEGKMIVGLTYEDPSVNLQKSGANVSIVYPTEGTVFVPSSVAIIKNAPSMKEAKLFINFMLSLDVQNAFGQSTSNRPIRKDAQTSNGMKALKDIATLKEDYRYVTKHKGQILKTYNRIRRNAD

SEQ ID NO: 766 - protein, 313 aa, Streptococcus agalactiae
KLLPPKELVILSPNSQAILTGTIPAFEEKYGIKVKLIQGGTGQLIDRLSKEGKQLKADIFFGGNYTQFESHKALFESYVSKNIHTVIPDYIHPSDTATPYTINGSVLIVNNELVKGLTIKSYEDLLQPSLKGKIAFADPNTSSSAFSQLTNILLAKGGYTNPKAWNYVKKLQHNINAIKSSSSSEVYQSVAEGKMIVGLTYEDPSVNLQKSGANVSIVYPTEGTVFVPSSVAIIKNAPSMKEAKLFINFMLSLDVQNAFGQSTSNRPIRKDAQTSNGMKALKDIATLKEDYRYVTKHKGQILKTYNRIRRNAD

SEQ ID NO: 767 - protein, 316 aa, Streptococcus agalactiae; identical to SEQ ID NO: 764

SEQ ID NO: 768 - protein, 316 aa, Streptococcus agalactiae
QPSKLLPPKELVILSPNSQAILTGTIPAFEEKYGIKVKLIQGGTGQLIDRLSKEGKQLKADIFFGGNYTQFESHKALFESYVSKNVHTVIPDYIHPSDTATPYTINGSVLIVNNELAKGLTIKSYEDLLQPSLKGKIAFADPNTSSSAFSQLTNILLAKGGYTNPKAWNYVKKLQHNINAIKSSSSSEVYQSVAEGKMIVGLTYEDPSVNLQKSGANVSIVYPTEGTVFVPSSVAIIKNAPSMKEAKLFINFMLSLDVQNAFGQSTSNRPIRKDAQTSNGMKALKDIATLKEDYRYVTKHKSQILKTYNRIRRNAD

SEQ ID NO: 769 - protein, 316 aa, Streptococcus agalactiae; identical to SEQ ID NO: 768

SEQ ID NO: 770 - protein, 316 aa, Streptococcus agalactiae; identical to SEQ ID NO: 768

SEQ ID NO: 771 - protein, 316 aa, Streptococcus agalactiae
QPFKLLPPKELVILSPNSQAILTGTIPAFEEKYGIKVKLIQGGTGQLIDRLSKEGKQLKADIFFGGNYTQFESHKALFESYVSKNVHTVIPDYIHPSDTATPYTINGSVLIVNNELAKGLTIKSYEDLLQPSLKGKIAFADPNTSSSAFSQLTNILLAKGGYTNPKAWNYVKKLQHNINAIKSSSSSEVYQSVAEGKMIVGLTYEDPSVNLQKSGANVSIVYPTEGTVFVPSSVAIIKNAPSMKEAKLFINFMLSLDVQNAFGQSTSNRPIRKDAQTSNGMKALKDIATLKEDYRYVTKHKGQILKTYNRIRRNAD

SEQ ID NO: 772 - protein, 299 aa, Streptococcus agalactiae
SQAILTGTIPAFEEKYGIKVKLIQGGTGQLIDRLSKEGKHLKADIFFGGNYTQFESHKALFESYVSKNVHTVIPDYIHPSDTATPYTINGSVLIVNNELAKGLTIKSYEDLLQPSLKGKIAFADPNTSSSAFSQLTNILLAKGGYTNPKAWNYVKKLQHNINAIKSSSSSEVYQSVAEGKMIVGLTYEDPSVNLQKSGANVSIVYPTEGTVFVPSSVAIIKNAPSMKEAKLFINFMLSLDVQNAFGQSTSNRPIRKDAQTSNGMKALKDIATLKEDYRYVTKHKGQILKTYNRIRRNAD

SEQ ID NO: 773 - protein, 316 aa, Streptococcus agalactiae
QPSKLLPPKELVILSPNSQAILTGTIPAFEEKYGIKVKLIQGGTGQLIDRLSKEGKQLKADVFFGGNYTQFESHKALFESYVSKNVHTVIPDYIHPSDTATPYTINGSVLIVNNELAKGLTIKSYEDLLQPSLKGKIAFADPNTSSSAFSQLTNILLAKGGYTNPKAWNYVKKLQHNINAIKSSSSSEVYQSVAEGKMIVGLTYEDPSVNLQKSGANVSIVYPTEGTVFVPSSVAIIKNAPSMKEAKLFINFMLSLDVQNAFGQSTSNRPIRKDAQTSNGMKALKDIATLKEDYRYVTKHKGQILKTYNRIRRNAD

SEQ ID NO: 774 - DNA, 912 bp, Streptococcus agalactiae
atggtaaaagttagtgtaagttctgtaggaactcaagcatcaacagtagctatttctatgtttagtcgtgtatcggctttaaatgatgcaataacaaaactatcatcttttgcagaggctgcaactcttcaagggactgcttattcaaatgcaaaaagctatgctactggaacgttaactccgatgcttcaaggaatgattcttttctctgaaacattgagtgagaaatgtacagaattacaaaccttatatgtctcaatttgtggtgatgaggatttagactctgtcgttttagaatcaaaattagcaagtgatagggcatcattaaagattgctgaagcacttttagagcatcttaacgatgatccagaaccttccaaatctgccataagttctacaaaaagtaatattaaaaaattaaaaaaacgtataaaatctaatcaaaagaaattagacaaccttaatgaatttaacgcccattcagcaacagtatttgcggacatttctaatgcacagtcaactgttaaccaagcactagcggctgtttcaacaggattttctggatataatagtaaaaccggagcttttggaaaaccaacatccggacagatggaatggacaaagacagttaagaagaattggaaagagcgagaagacgccaaagctgaagaactgaaaagtaaaaaggctgaagaaagtaagaaagcttcaaaaattgaaaatactactaaaaaaagtaatgtttcagttgataaaaagaaattaataaaagcggctaatgaagcgtataaattaggagaaattaaaaaagatacctatgaatcaattatcagtggtttaagtaatgcatcggctgccttacttaaagaggtagctaaatcaaaattgactgacacagctcggctattgatg

SEQ ID NO: 775 - DNA, 834 bp, Streptococcus agalactiae
ttaaatgatgcaataacaaaactatcatcttttgcagaggctgcaactcttcaagggactgcttattcaaatgcaaaaagctatgctactggaacgttaactccgatgcttcaaggaatgattcttttctctgaaacattgagtgagaaatgtacagaattacaaaccttatatgtctcaatttgtggtgatgaggatttagactctgtcgttttagaatcaaaattagcaagtgatagggcatcattaaagattgctgaagcacttttagagcatcttaacgatgatccagaaccttccaaatctgccataagttctacaaaaagtaatattaaaaaattaaaaaaacgtataaaatctaatcaaaagaaattagacaaccttaatgaatttaacgcccattcagcaacagtatttgcggacatttctaatgcacagtcaactgttaaccaagcactagcggctgtttcaacaggattttctggatataatagtaaaaccggagcttttggaaaaccaacatccggacagatggaatggacaaagacagttaagaagaattggaaagagcgagaagacgccaaagctgaagaactgaaaagtaaaaaggctgaagaaagtaagaaagcttcaaaaattgaaaatactactaaaaaaagtaatgtttcagttgataaaaagaaattaataaaagcggctaatgaagcgtataaattaggagaaattaaaaaagatacctatgaatcaattatcagtggtttaagtaatgcatcggctgccttacttaaagaggtagctaaatcaaaattgactgacacagctcggctattgatg

SEQ ID NO: 776 - DNA, 834 bp, Streptococcus agalactiae; identical to SEQ ID NO: 775

SEQ ID NO: 777 - protein, 304 aa, Streptococcus agalactiae
MVKVSVSSVGTQASTVAISMFSRVSALNDAITKLSSFAEAATLQGTAYSNAKSYATGTLTPMLQGMILFSETLSEKCTELQTLYVSICGDEDLDSVVLESKLASDRASLKIAEALLEHLNDDPEPSKSAISSTKSNIKKLKKRIKSNQKKLDNLNEFNAHSATVFADISNAQSTVNQALAAVSTGFSGYNSKTGAFGKPTSGQMEWTKTVKKNWKEREDAKAEELKSKKAEESKKASKIENTTKKSNVSVDKKKLIKAANEAYKLGEIKKDTYESIISGLSNASAALLKEVAKSKLTDTARLLM

SEQ ID NO: 778 - protein, 278 aa, Streptococcus agalactiae
LNDAITKLSSFAEAATLQGTAYSNAKSYATGTLTPMLQGMILFSETLSEKCTELQTLYVSICGDEDLDSVVLESKLASDRASLKIAEALLEHLNDDPEPSKSAISSTKSNIKKLKKRIKSNQKKLDNLNEFNAHSATVFADISNAQSTVNQALAAVSTGFSGYNSKTGAFGKPTSGQMEWTKTVKKNWKEREDAKAEELKSKKAEESKKASKIENTTKKSNVSVDKKKLIKAANEAYKLGEIKKDTYESIISGLSNASAALLKEVAKSKLTDTARLLM

SEQ ID NO: 779 - protein, 278 aa, Streptococcus agalactiae; identical to SEQ ID NO: 778

SEQ ID NO: 780 - DNA, 816 bp, Streptococcus agalactiae
atgattttaaaaatttgtcgtgcagcatatagtttacaatggggaggtgtttaccaattagctttgctggattatcctcgaattaaggcgtttgaattggaaaggataggagctttcatagcttacgagaaacaatataaaagaaaaactgagatacaatgtgacgataaacatctcctcgcaaaaattgttcattttttaaaatacaatagttttacttttccctatattcccaaatatagagaagcggcagctacttttaatgaggatggtattagtttaacttctgattttttaagccatacatgtacgattgaaactgcaaaactaatttttaaagaaggtaaaatcttatcagcagttaaagcctttaataagcctgctgaagtactggtaaaagataagaggaatgctgctggagaccctaaagattactttgactatgtgatgttgaactggtcaaataccaattctggttatcgtttagtaatggaaagattgttaggcaaagcaccatctgaacaggagttaacagtaggttttaagccaggggtcagttttcattttacttatcaagatatcatcaatcatcctgattctatttttgatggttatcatcctgctaaaattaaaaatcagctttctttagcagaacatttagttgcatgtgttatcccaaaacattatcaagaagattatcaaagccttgtgcccaatgacttgaaacacagggtttattatttagattactgtaacgaaacactttatgagtggaatcaaaaagtttatgattttctttgtcatttggaaaataaa

SEQ ID NO: 781 - DNA, 749 bp, Streptococcus agalactiae
tggattatcctctaattaaggcgtttgaattggaaaggataggagctttcatagcttacgagaaacaatataaaagaaaaattgagatacaatgtgacgataaacatctcctcacaaaaattgttcattttttaaaatacaatagttttacttttccctatattcccaaatatagagaagcggcagctacttttaatgaggatggtattagtttaacttctgattttttaagccatacatgtacgattgaaactgcaaaactaatttttaaagaaggtaaaatcttatcagcagttaaagcctttaataagcctgctgaagtactggtaaatgataagaggaatgctgctggagaccctaaagattactttgactatgtgatgttgaactggtcaaataccaattctggttatcgtttagtaatggaaagattgttaggcaaagcaccatctgaacaggagttaacagtagcttttaagccaggggtcagctttcattttaattatcaagatatcatcaatcatcctgattctatttttgatggttatcatcctgctaaaattaaaaatcaactttctttagcagaacatttagttgcatgtgttatcccaaaacattatcaagaagattatcaaagccttgtgcctaatgacttgaaacacagagtttattatttagattactgtaacgaaacactttatgagtggaatcaaaaagtttatgattttctttgtcatttggaaaataaa

SEQ ID NO: 782 - DNA, 753 bp, Streptococcus agalactiae
ttgctggattatcctcgaattaaggcgtttgaattggaaaggataggagctttcatagcttacgagaaacaatataaaagaaaaattgagatacaatgtgacgataaacatctcctcacaaaaattgttcattttttaaaatacaatagttttacttttccctatattcccaaatatagagaagcggcagctacttttaatgaggatggtattagtttaacttctgattttttaagccatacatgtacgattgaaactgcaaaactaatttttaaagaaggtaaaatcttatcagcagttaaagcctttaataagcctgctgaagtactggtaaatgataagaggaatgctgctggagaccctaaagattactttgactatgtgatgttgaactggtcaaataccaattctggttatcgtttagtaatggaaagattgttaggcaaagcaccatctgaacaggagttaacagtagcttttaagccaggggtcagctttcattttaattatcaagatatcatcaatcatcctgattctatttttgatggttatcatcctgctaaaattaaaaatcaactttctttagcagaacatttagttgcatgtgttatcccaaaacattatcaagaagattatcaaagccttgtgcctaatgacttgaaacacagagtttattatttagattactgtaacgaaacactttatgagtggaatcaaaaagtttatgattttctttgtcatttggaaaataaa

SEQ ID NO: 783 - DNA, 734 bp, Streptococcus agalactiae
ttaaggcgtttgaattggaaaggataggagctttcatagcttacgagaaacaatataaaagaaaaattgagatacaatgtgacgataaacatctcctcacaaaaattgttcattttttaaaatacaatagttttacttttccctatattcccaaatatagagaagcggcagctacttttaatgaggatggtattagtttaacttctgattttttaagccatacatgtacgattgaaactgcaaaactaatttttaaagaaggtaaaatcttatcagcagttaaagcctttaataagcctgctgaagtactggtaaatgataagaggaatgctgctggagaccctaaagattactttgactatgtgatgttgaactggtcaaataccaattctggttatcgtttagtaatggaaagattgttaggcaaagcaccatctgaacaggagttaacagtagcttttaagccaggggtcagctttcattttaattatcaagatatcatcaatcatcctgattctatttttgatggttatcatcctgctaaaattaaaaatcaactttctttagcagaacatttagttgcatgtgttatcccaaaacattatcaagaagattatcaaagccttgtgcctaatgacttgaaacacagagtttattatttagattactgtaacgaaacactttatgagtggaatcaaaaagtttatgattttctttgtcatttggaaaataaa

SEQ ID NO: 784 - DNA, 753 bp, Streptococcus agalactiae
ttgctggattatcctcgaattaaggcgtttgaattggaaaggataggagctttcatagcttacgagaaacaatataaaagaaaaactgagatacaatgtgacgataaacatctcctcgcaaaaattgttcattttttaaaatacaatagttttacttttccctatattcccaaatatagagaagcggcagctacttttaatgaggatggtattagtttaacttctgattttttaagccatacatgtacgattgaaactgcaaaactaatttttaaagaaggtaaaatcttatcagcagttaaagcctttaataagcctgctgaagtactggtaaaagataagaggaatgctgctggagaccctaaagattactttgactatgtgatgttgaactggtcaaataccaattctggttatcgtttagtaatggaaagattgttaggcaaagcaccatctgaacaggagttaacagtaggttttaagccaggggtcagttttcattttacttatcaagatatcatcaatcatcctgattctatttttgatggttatcatcctgctaaaattaaaaatcagctttctttagcagaacatttagttgcatgtgttatcccaaaacattatcaagaagattatcaaagccttgtgcccaatgacttgaaacacagggtttattatttagattactgtaacgaaacactttatgagtggaatcaaaaagtttatgattttctttgtcatttggaaaataaa

SEQ ID NO: 785 - DNA, 753 bp, Streptococcus agalactiae
  misc_feature 738: n = A,T,C or G
ttgctggattatcctcgaattaaggcgtttgaattggaaaggataggagctttcatagcttacgagaaacaatataaaagaaaaactgagatacaatgtgacgataaacatctcctcgcaaaaattgttcattttttaaaatacaatagttttacttttccctatattcccaaatatagagaagcggcagctacttttaatgaggatggtattagtttaacttctgattttttaagccatacatgtacgattgaaactgcaaaactaatttttaaagaaggtaaaatcttatcagcagttaaagcctttaataagcctgctgaagtactggtaaaagataagaggaatgctgctggagaccctaaagattactttgactatgtgatgttgaactggtcaaataccaattctggttatcgtttagtaatggaaagattgttaggcaaagcaccatctgaacaggagttaacagtaggttttaagccaggggtcagttttcattttacttatcaagatatcatcaatcatcctgattctatttttgatggttatcatcctgctaaaattaaaaatcagctttctttagcagaacatttagttgcatgtgttatcccaaaacattatcaagaagattatcaaagccttgtgcccaatgacttgaaacacagggtttattatttagattactgtaacgaaacactttatgagtggaatcaaaaagtttatgattttctttgncatttggaaaataaa

SEQ ID NO: 786 - DNA, 753 bp, Streptococcus agalactiae
ttgctggattatcctcgaattaaggcgtttgaattggaaaggataggagctttcatagcttacgagaaacaatataaaagaaaaactgagatacaatgtgacgataaacatctcctcgcaaaaattgttcattttttaaaatacaatagttttacttttccctatattcccaaatatagagaagcggcagctacttttaatgaggatggtattagtttaacttctgattttttaagccatacatgtacgattgaaactgcaaaactaatttttaaagaaggtaaaatcttatcagcagttaaagcctttaataagcctgctgaagtactggtaaaagataagaggaatgctgctggagaccctaaagattactttgactatgtgatgttgaactggtcaaataccaattctggttatcgtttagtaatggaaagattgttaggcaaagcaccatctgaacaggagttaacagtaggttttaagccaggggtcagttttcattttacttatcaagatatcatcaatcatcctgattctatttttgatggttatcatcctgctaaaattaaaaatcagctttctttagcagaacatttagttgcatgtgttatcccaaaacattatcaagaagattatcaaagccttgtgcccaatgacttgaaacacagggtttattatttagattactgtaacgaaacactttatgagtggaatcaaaaagtttatgattttctttggcatttggaaaataaa

SEQ ID NO: 787 - DNA, 753 bp, Streptococcus agalactiae; identical to SEQ ID NO: 784

SEQ ID NO: 788 - DNA, 753 bp, Streptococcus agalactiae; identical to SEQ ID NO: 782

SEQ ID NO: 789 - DNA, 736 bp, Streptococcus agalactiae
aattaaggcgtttgaattggaaaggataggagctttcatagcttacgagaaacaatataaaagaaaaactgagatacaatgtgacgataaacatctcctcgcaaaaattgttcattttttaaaatacaatagttttacttttccctatattcccaaatatagagaagcggcagctacttttaatgaggatggtattagtttaacttctgattttttaagccatacatgtacgattgaaactgcaaaactaatttttaaagaaggtaaaatcttatcagcagttaaagcctttaataagcctgctgaagtactggtaaatgataagaggaatgctgctggagaccctaaagattactttgactatgtgatgttgaactggtcaaataccaattctggttatcgtttagtaatggaaagattgttaggcaaagcaccatctgaacaggagttaacagtaggttttaagccaggggtcagctttcattttacttatcaagatatcatcaatcatcctgattctatttttgatggttatcatcctgctaaaattaaaaatcagctttctttagcagaacatttagttgcgtgtgttatcccaaaacattatcaagaagattatcaaaatcttgtgcccaatgacttgaaacacagagtttattatttagattactgtaacgaaacactttatgagtggaatcaaaaagtttatgattttctttgtcatttggaaaataaa

SEQ ID NO: 790 - DNA, 711 bp, Streptococcus agalactiae
ataggagctttcatagcttacgagaaacaatataaaagaaaaattgagatacaatgtgacgataaacatctcctcacaaaaattgttcattttttaaaatacaatagttttacttttccctatattcccaaatatagagaagcggcagctacttttaatgaggatggtattagtttaacttctgattttttaagccatacatgtacgattgaaactgcaaaactaatttttaaagaaggtaaaatcttatcagcagttaaagcctttaataagcctgctgaagtactggtaaatgataagaggaatgctgctggagaccctaaagattactttgactatgtgatgttgaactggtcaaataccaattctggttatcgtttagtaatggaaagattgttaggcaaagcaccatctgaacaggagttaacagtagcttttaagccaggggtcagctttcattttaattatcaagatatcatcaatcatcctgattctatttttgatggttatcatcctgctaaaattaaaaatcaactttctttagcagaacatttagttgcatgtgttatcccaaaacattatcaagaagattatcaaagccttgtgcctaatgacttgaaacacagagtttattatttagattactgtaacgaaacactttatgagtggaatcaaaaagtttatgattttctttgtcatttggaaaataaa

SEQ ID NO: 791 - protein, 272 aa, Streptococcus agalactiae
MILKICRAAYSLQWGGVYQLALLDYPRIKAFELERIGAFIAYEKQYKRKTEIQCDDKHLLAKIVHFLKYNSFTFPYIPKYREAAATFNEDGISLTSDFLSHTCTIETAKLIFKEGKILSAVKAFNKPAEVLVKDKRNAAGDPKDYFDYVMLNWSNTNSGYRLVMERLLGKAPSEQELTVGFKPGVSFHFTYQDIINHPDSIFDGYHPAKIKNQLSLAEHLVACVIPKHYQEDYQSLVPNDLKHRVYYLDYCNETLYEWNQKVYDFLCHLENK

SEQ ID NO: 792 - protein, 251 aa, Streptococcus agalactiae
LLDYPRIKAFELERIGAFIAYEKQYKRKIEIQCDDKHLLTKIVHFLKYNSFTFPYIPKYREAAATFNEDGISLTSDFLSHTCTIETAKLIFKEGKILSAVKAFNKPAEVLVNDKRNAAGDPKDYFDYVMLNWSNTNSGYRLVMERLLGKAPSEQELTVAFKPGVSFHFNYQDIINHPDSIFDGYHPAKIKNQLSLAEHLVACVIPKHYQEDYQSLVPNDLKHRVYYLDYCNETLYEWNQKVYDFLCHLENK

SEQ ID NO: 793 - protein, 244 aa, Streptococcus agalactiae
KAFELERIGAFIAYEKQYKRKIEIQCDDKHLLTKIVHFLKYNSFTFPYIPKYREAAATFNEDGISLTSDFLSHTCTIETAKLIFKEGKILSAVKAFNKPAEVLVNDKRNAAGDPKDYFDYVMLNWSNTNSGYRLVMERLLGKAPSEQELTVAFKPGVSFHFNYQDIINHPDSIFDGYHPAKIKNQLSLAEHLVACVIPKHYQEDYQSLVPNDLKHRVYYLDYCNETLYEWNQKVYDFLCHLENK

SEQ ID NO: 794 - protein, 251 aa, Streptococcus agalactiae
LLDYPRIKAFELERIGAFIAYEKQYKRKTEIQCDDKHLLAKIVHFLKYNSFTFPYIPKYREAAATFNEDGISLTSDFLSHTCTIETAKLIFKEGKILSAVKAFNKPAEVLVKDKRNAAGDPKDYFDYVMLNWSNTNSGYRLVMERLLGKAPSEQELTVGFKPGVSFHFTYQDIINHPDSIFDGYHPAKIKNQLSLAEHLVACVIPKHYQEDYQSLVPNDLKHRVYYLDYCNETLYEWNQKVYDFLCHLENK

SEQ ID NO: 795 - protein, 251 aa, Streptococcus agalactiae
  VARIANT 246: Xaa = Any Amino Acid
LLDYPRIKAFELERIGAFIAYEKQYKRKTEIQCDDKHLLAKIVHFLKYNSFTFPYIPKYREAAATFNEDGISLTSDFLSHTCTIETAKLIFKEGKILSAVKAFNKPAEVLVKDKRNAAGDPKDYFDYVMLNWSNTNSGYRLVMERLLGKAPSEQELTVGFKPGVSFHFTYQDIINHPDSIFDGYHPAKIKNQLSLAEHLVACVIPKHYQEDYQSLVPNDLKHRVYYLDYCNETLYEWNQKVYDFLXHLENK

SEQ ID NO: 796 - protein, 251 aa, Streptococcus agalactiae
LLDYPRIKAFELERIGAFIAYEKQYKRKTEIQCDDKHLLAKIVHFLKYNSFTFPYIPKYREAAATFNEDGISLTSDFLSHTCTIETAKLIFKEGKILSAVKAFNKPAEVLVKDKRNAAGDPKDYFDYVMLNWSNTNSGYRLVMERLLGKAPSEQELTVGFKPGVSFHFTYQDIINHPDSIFDGYHPAKIKNQLSLAEHLVACVIPKHYQEDYQSLVPNDLKHRVYYLDYCNETLYEWNQKVYDFLWHLENK

SEQ ID NO: 797 - protein, 251 aa, Streptococcus agalactiae; identical to SEQ ID NO: 794

SEQ ID NO: 798 - protein, 251 aa, Streptococcus agalactiae; identical to SEQ ID NO: 792

SEQ ID NO: 799 - protein, 245 aa, Streptococcus agalactiae
IKAFELERIGAFIAYEKQYKRKTEIQCDDKHLLAKIVHFLKYNSFTFPYIPKYREAAATFNEDGISLTSDFLSHTCTIETAKLIFKEGKILSAVKAFNKPAEVLVNDKRNAAGDPKDYFDYVMLNWSNTNSGYRLVMERLLGKAPSEQELTVGFKPGVSFHFTYQDIINHPDSIFDGYHPAKIKNQLSLAEHLVACVIPKHYQEDYQNLVPNDLKHRVYYLDYCNETLYEWNQKVYDFLCHLENK

SEQ ID NO: 800 - protein, 237 aa, Streptococcus agalactiae
IGAFIAYEKQYKRKIEIQCDDKHLLTKIVHFLKYNSFTFPYIPKYREAAATFNEDGISLTSDFLSHTCTIETAKLIFKEGKILSAVKAFNKPAEVLVNDKRNAAGDPKDYFDYVMLNWSNTNSGYRLVMERLLGKAPSEQELTVAFKPGVSFHFNYQDIINHPDSIFDGYHPAKIKNQLSLAEHLVACVIPKHYQEDYQSLVPNDLKHRVYYLDYCNETLYEWNQKVYDFLCHLENK

SEQ ID NO: 801 - protein, 249 aa, Streptococcus agalactiae
DYPLIKAFELERIGAFIAYEKQYKRKIEIQCDDKHLLTKIVHFLKYNSFTFPYIPKYREAAATFNEDGISLTSDFLSHTCTIETAKLIFKEGKILSAVKAFNKPAEVLVNDKRNAAGDPKDYFDYVMLNWSNTNSGYRLVMERLLGKAPSEQELTVAFKPGVSFHFNYQDIINHPDSIFDGYHPAKIKNQLSLAEHLVACVIPKHYQEDYQSLVPNDLKHRVYYLDYCNETLYEWNQKVYDFLCHLENK

SEQ ID NO: 802 - DNA, 582 bp, Streptococcus agalactiae
atgaaaagtcgaaaaaaagataaattggtattgaggttaacaacaacactattggtttttggtttgggtggggtttggttttataattataaaaatgataatgtcgaaccgacagtcactagtgcatcggatcaaacgacgacttttattcaaacgatttctccaacagctattgaaatttctaagacctatgatttgtatgcgtcagtcttattagcacaagctattttggaatcatccagtggacaatcagatttgtctaaggctcctaattataacctctttggcatcaaaggagaatataaaggtaaatctgtccaaatgcctactttagaagatgatgggaaaggcaatatgactcaaatccaagctccttttcgcgcctatccaaattattctgcttcactatatgattatgctgagttagtatctagtcaaaagtatgcatctgtttggaaatcaaatacctcttcttataaggatgctactgcagctctaacaggtctttatgcgacagatactgcttatgctagtaaattaaaccaaattattgaaacctacagtctagatgcttatgataaa

SEQ ID NO: 803 - DNA, 513 bp, Streptococcus agalactiae
ggggtttggttttataattataaaaatgataatgtcgaaccgacagtcactagtgcatcggatcaaacgacgacttttattcaaacgatttctccaacagctattgaaatttctaagacctatgatttgtatgcgtcagtcttattagcacaagctattttggaatcatccagtggacaatcagatttgtctaaggctcctaattataacctctttggcatcaaaggagaatataaaggtaaatctgtccaaatgcctactttagaagatgatgggaaaggcaatatgactcaaatccaagctccttttcgcgcctatccaaattattctgcttcactatatgattatgctgagttagtatctagtcaaaagtatgcatctgtttggaaatcaaatacctcttcttataaggatgctactgcagctctaacaggtctttatgcgacagatactgcttatgctagtaaattaaaccaaattattgaaacctacagtctagatgcttatgataaa

SEQ ID NO: 804 - DNA, 513 bp, Streptococcus agalactiae
ggggtttggttttataattataaaaatgataatgtcgaaccgacagtcactagtgcatcggatcaaacgacgacttttattcaaacgatttctccaacagctattgaaatttctaagacctatgatttgtatgcgtcagtcttattagcacaagctattttggaatcatccagtggacaatcagatttgtctaaggctcctaattataacctctttggcatcaaaggagaatataaaggtaaatctgtccaaatgcctactttagaagatgatgggaaaggcaatatgactcaaatccaagctccttttcgcgcctatccaaattattctgcttcactatatgattatgctgagttagtatctagtcaaaagtatgcatctgcttggaaatcaaatacttcttcttataaggatgctactgcagctctaacaggtctttatgcgacagatactgcttatgctagtaaattaaaccaaattattgaaacctacagtctagatgcttatgataaa

SEQ ID NO: 805 - DNA, 513 bp, Streptococcus agalactiae; identical to SEQ ID NO: 804

SEQ ID NO: 806 - DNA, 513 bp, Streptococcus agalactiae; identical to SEQ ID NO: 803

SEQ ID NO: 807 - DNA, 513 bp, Streptococcus agalactiae
ggggtttggttttataattataaaaatgataatgtcgaaccgacagtcactagtgcatcggatcaaacgacgacttttattcaaacgatttctccaacagctattgaaatttctaagacctatgatttgtatgcgtcagtcttattagcacaagctattttggaatcatccagtggacaatcagatttgtctaaggctcctaattataacctctttggcatcaaaggagaatataaaggtaaatctgtccaaatgcctactttagaagatgatgggaaaggcaatatgactcaaatccaagctccttttcgcgcctatccaaattattctgcttcactatatgattatgctgagttagtatctagtcaaaagtatgcatctgtttggaaatcaaatacttcttcttataaggatgctactgcagctctaacaggtctttatgcgacagatactgcttatgctagtaaattaaaccaaattattgaaacctacagtctagatgcttatgataaa

SEQ ID NO: 808 - DNA, 513 bp, Streptococcus agalactiae; identical to SEQ ID NO: 807

SEQ ID NO: 809 - DNA, 513 bp, Streptococcus agalactiae; identical to SEQ ID NO: 807

SEQ ID NO: 810 - DNA, 513 bp, Streptococcus agalactiae; identical to SEQ ID NO: 803

SEQ ID NO: 811 - DNA, 513 bp, Streptococcus agalactiae
ggggtttggttttataattataaaaatgataatgtcgaacagacagtcactagtgcatcggatcaaacgacgacttttattcaaacgatttccccaacagctattgaaatttctaagacctatgatttgtatgcgtcagtcttattagcacaagctattttggaatcatccagtggacaatcagatttgtctaaggctcctaattataacctctttggcatcaaaggagaatataaaggtaaatctgtccaaatgcctactttagaagatgatgggaaaggcaatatgactcaaatccaagctccttttcgcgcctatccaaattattctgcttcactatatgattatgctgagttagtatctagtcaaaagtatgcatctgtttggaaatcaaatacttcttcttataaggatgctactgcagctctaacaggtctttatgcgacagatactgcttatgctagtaaattaaaccaaattattgaaacctacagtctagatgcttatgataaa

SEQ ID NO: 812 - DNA, 509 bp, Streptococcus agalactiae
tttggttttataattataaaaatgataatgtcgaaccgacagtcactagtgcatcggatcaaacgacgacttttattcaaacgatttccccaacagctattgaaatttctaagacctatgatttgtatgcgtcagtcttattagcacaagctattttggaatcatccagtggacaatcagatttgtctaaggctcctaattataacctctttggcatcaaaggagaatataaaggtaaatctgttcaaatgcctactttagaagatgatgggaaaggtaatatgacccaaatccaagctccttttcgcgcctatccaaattattctgcttcactatatgattatgctgagttagtatctagtcaaaagtatgcatctgtttggaaatcaaatacctcttcttataaggatgctactgcagctctaacaggtctttatgcgacagatactgcttatgctagtaaattaaaccaaattattgaaaactacagtctagatgcttatgataaa

SEQ ID NO: 813 - protein, 194 aa, Streptococcus agalactiae
MKSRKKDKLVLRLTTTLLVFGLGGVWFYNYKNDNVEPTVTSASDQTTTFIQTISPTAIEISKTYDLYASVLLAQAILESSSGQSDLSKAPNYNLFGIKGEYKGKSVQMPTLEDDGKGNMTQIQAPFRAYPNYSASLYDYAELVSSQKYASVWKSNTSSYKDATAALTGLYATDTAYASKLNQIIETYSLDAYDK

SEQ ID NO: 814 - protein, 171 aa, Streptococcus agalactiae
GVWFYNYKNDNVEPTVTSASDQTTTFIQTISPTAIEISKTYDLYASVLLAQAILESSSGQSDLSKAPNYNLFGIKGEYKGKSVQMPTLEDDGKGNMTQIQAPFRAYPNYSASLYDYAELVSSQKYASVWKSNTSSYKDATAALTGLYATDTAYASKLNQIIETYSLDAYDK

SEQ ID NO: 815 - protein, 171 aa, Streptococcus agalactiae
GVWFYNYKNDNVEPTVTSASDQTTTFIQTISPTAIEISKTYDLYASVLLAQAILESSSGQSDLSKAPNYNLFGIKGEYKGKSVQMPTLEDDGKGNMTQIQAPFRAYPNYSASLYDYAELVSSQKYASAWKSNTSSYKDATAALTGLYATDTAYASKLNQIIETYSLDAYDK

SEQ ID NO: 816 - protein, 171 aa, Streptococcus agalactiae; identical to SEQ ID NO: 815

SEQ ID NO: 817 - protein, 171 aa, Streptococcus agalactiae; identical to SEQ ID NO: 814

SEQ ID NO: 818 - protein, 171 aa, Streptococcus agalactiae; identical to SEQ ID NO: 814

SEQ ID NO: 819 - protein, 171 aa, Streptococcus agalactiae; identical to SEQ ID NO: 814

SEQ ID NO: 820 - protein, 171 aa, Streptococcus agalactiae; identical to SEQ ID NO: 814

SEQ ID NO: 821 - protein, 171 aa, Streptococcus agalactiae
GVWFYNYKNDNVEQTVTSASDQTTTFIQTISPTAIEISKTYDLYASVLLAQAILESSSGQSDLSKAPNYNLFGIKGEYKGKSVQMPTLEDDGKGNMTQIQAPFRAYPNYSASLYDYAELVSSQKYASVWKSNTSSYKDATAALTGLYATDTAYASKLNQIIETYSLDAYDK

SEQ ID NO: 822 - protein, 169 aa, Streptococcus agalactiae
WFYNYKNDNVEPTVTSASDQTTTFIQTISPTAIEISKTYDLYASVLLAQAILESSSGQSDLSKAPNYNLFGIKGEYKGKSVQMPTLEDDGKGNMTQIQAPFRAYPNYSASLYDYAELVSSQKYASVWKSNTSSYKDATAALTGLYATDTAYASKLNQIIENYSLDAYDK

SEQ ID NO: 823 - DNA, 495 bp, Streptococcus agalactiae
atgaacaagtctaagaaaatcgaaaattatcaattattattactacaagcgcaagctctattctcagatgaaacaaatgctcttgccaacttatcaaatgcttcagctatgctaaatgctatgcttccaaattctgtatttacaggcttttatttatttgatggagaagagttaattcttggccctttccagggtggtgtatcatgtgtgcatattactttaggaaaaggtgtttgtggtgaatctgcacaaactgctaagacgctgatcgttgatgatgttacaaagcatgctaactatatctcctgtgattcaaaagctatgagtgaaatcgtagtacctatgtttaaaaatggcaaacttctaggagttctagatttagattcttctttagtagcagattatgatgagattgatcaagaatacttagaaaaatttgtaggtattctagtagaacatacgatttggaatttggatatgtttggagttgaaaag

SEQ ID NO: 824 - DNA, 423 bp, Streptococcus agalactiae
ctctattctcagatgaaacaaatgctcttgccaacttatcaaatgcttcagctatgctaaatgctatgcttccaaattctgtatttacaggcttttatttatttgatggaaaggagttaattcttggccctttccagggtggtgtatcatgtgtgcatattactttaggaaaaggtgtttgtggtgaatctgcacaaactgctaagacgctgattgttgatgatgttacaaagcatgctaactatatctcctgtgattcaaaagctatgagtgaaatcgtagtacctatgtttaaaaatggcaaacttctaggagttctagatttagattcttctttagtagcagattatgatgagattgatcaagaatacttagaaaaatttgtaggtattctagtagaacatacgatttggaatttggata

SEQ ID NO: 825 - DNA, 440 bp, Streptococcus agalactiae
ctctattctcagatgaaacaaatgctcttgccaacttatcaaatgcttcagctatgctaaatgctatgcttccaaattctgtatttacaggcttttatttatttgatggagaagagttaattcttggccctttccagggtggtgtatcatgtgtgcatattactttaggaaaaggtgtttgtggtgaatctgcacaaactgctaagacgctgatcgttgatgatgttacaaagcatgctaactatatctcctgtgattcaaaagctatgagtgaaatcgtagtacctatgtttaaaaatggcaaacttctaggagttctagatttagattcttctttagtagcagattatgatgagattgatcaagaatacttagaaaaatttgtaggtattctagtagaacatacgatttggaatttggatatgtttggagttgaaaag

SEQ ID NO: 826 - DNA, 440 bp, Streptococcus agalactiae; identical to SEQ ID NO: 825

SEQ ID NO: 827 - DNA, 440 bp, Streptococcus agalactiae; identical to SEQ ID NO: 825

SEQ ID NO: 828 - DNA, 440 bp, Streptococcus agalactiae
ctctattctcagatgaaacaaatgctcttgccaacttatcaaatgcttcagctatgctaaatgctatgcttccaaattctgtatttacaggcttttatttatttgatggagaggagttaattcttggcccttttcagggtggtgtatcatgtgtgcatattactttaggaaaaggtgtttgtggtgaatctgcacaaactgctaagacgctgattgttgatgatgttacaaagcatgctaactatatctcctgtgattcaaaagctatgagtgaaatcgtagtacccatgtttaaaaatggcaaacttctaggagttctagatttagattcttctttagtagcagattatgatgagattgatcaagaatacttagaaaaatttgtaggtattctagtagaacatacgatttggaatttggatatgtttggagttgaaaag

SEQ ID NO: 829 - DNA, 440 bp, Streptococcus agalactiae; identical to SEQ ID NO: 828

SEQ ID NO: 830 - DNA, 440 bp, Streptococcus agalactiae; identical to SEQ ID NO: 828

SEQ ID NO: 831 - DNA, 440 bp, Streptococcus agalactiae
ctctattctcagatgaaacaaatgctcttgccaacttatcaaatgcttcagctatgctaaatgctatgcttccaaattctgtatttacaggcttttatttatttgatggaaaggagttaattcttggccctttccagggtggtgtatcatgtgtgcatattactttaggaaaaggtgtttgtggtgaatctgcacaaactgctaagacgctgattgttgatgatgttacaaagcatgctaactatatctcctgtgattcaaaagctatgagtgaaatcgtagtacctatgtttaaaaatggcaaacttctaggagttctagatttagattcttctttagtagcagattatgatgagattgatcaagaatacttagaaaaatttgtaggtattctagtagaacatacgatttggaatttggatatgtttggagttgaaaag

SEQ ID NO: 832 - DNA, 440 bp, Streptococcus agalactiae
ctctattctcagatgaaacaaatgctcttgccaacttatcaaatgcttcagctatgctaaatgctatgcttccaaattctgtatttacaggcttttatttatttgatggagaagagttaattcttggccctttccagggtggtgtatcatgtgtgcatattactttaggaaaaggtgtttgtggtgaatctgcacaaactgctaagacgctgattgttgatgatgttacaaagcatgctaactatatctcctgtgattcaaaagctatgagtgaaatcgtagtacccatgtttaaaaatggcaaacttctaggagttctagatttagattcttctttagtagcagattatgatgagattgatcaagaatacttagaaaaatttgtaggtattctagtagaacatacgatttggaatttggatatgtttggagttgaaaag

SEQ ID NO: 833 - DNA, 440 bp, Streptococcus agalactiae; identical to SEQ ID NO: 825

SEQ ID NO: 834 - protein, 165 aa, Streptococcus agalactiae
MNKSKKIENYQLLLLQAQALFSDETNALANLSNASAMLNAMLPNSVFTGFYLFDGEELILGPFQGGVSCVHITLGKGVCGESAQTAKTLIVDDVTKHANYISCDSKAMSEIVVPMFKNGKLLGVLDLDSSLVADYDEIDQEYLEKFVGILVEHTIWNLDMFGVEK

SEQ ID NO: 835 - protein, 140 aa, Streptococcus agalactiae
LFSDETNALANLSNASAMLNAMLPNSVFTGFYLFDGKELILGPFQGGVSCVHITLGKGVCGESAQTAKTLIVDDVTKHANYISCDSKAMSEIVVPMFKNGKLLGVLDLDSSLVADYDEIDQEYLEKFVGILVEHTIWNLD

SEQ ID NO: 836 - protein, 146 aa, Streptococcus agalactiae
LFSDETNALANLSNASAMLNAMLPNSVFTGFYLFDGEELILGPFQGGVSCVHITLGKGVCGESAQTAKTLIVDDVTKHANYISCDSKAMSEIVVPMFKNGKLLGVLDLDSSLVADYDEIDQEYLEKFVGILVEHTIWNLDMFGVEK

SEQ ID NO: 837 - protein, 146 aa, Streptococcus agalactiae; identical to SEQ ID NO: 836

SEQ ID NO: 838 - protein, 146 aa, Streptococcus agalactiae; identical to SEQ ID NO: 836

SEQ ID NO: 839 - protein, 146 aa, Streptococcus agalactiae; identical to SEQ ID NO: 836

SEQ ID NO: 840 - protein, 146 aa, Streptococcus agalactiae; identical to SEQ ID NO: 836

SEQ ID NO: 841 - protein, 146 aa, Streptococcus agalactiae; identical to SEQ ID NO: 836

SEQ ID NO: 842 - protein, 146 aa, Streptococcus agalactiae; identical to SEQ ID NO: 836

SEQ ID NO: 843 - protein, 146 aa, Streptococcus agalactiae
LFSDETNALANLSNASAMLNAMLPNSVFTGFYLFDGKELILGPFQGGVSCVHITLGKGVCGESAQTAKTLIVDDVTKHANYISCDSKAMSEIVVPMFKNGKLLGVLDLDSSLVADYDEIDQEYLEKFVGILVEHTIWNLDMFGVEK

SEQ ID NO: 844 - protein, 146 aa, Streptococcus agalactiae; identical to SEQ ID NO: 836

SEQ ID NO: 845 - protein, 146 aa, Streptococcus agalactiae; identical to SEQ ID NO: 836

SEQ ID NO: 846 - DNA, 405 bp, Streptococcus agalactiae
atgaaaaagagtacccaaataatactactaatagttgcattattcatacttgtttttagcggaggattttatatgaaagaacaacaaagaaaagaagaactaaaacggaatcgagaatatgaagttagtctagtcaaagcattgaaaaattcctatgagaatatagaagaaataaaaatcacacatcctgtttcaactgaaattcctggagattggcattgtactgtaaagatttcatttaatgataaaaaatctattgtttataatattacacataatttggaatcgaaaaaaaattatagcggaaaatttaatgaaaaaaatatgaatttttttgattcaagaattggtaaaacaaaaaaaactataaaaattattttttcagatggtcaggagaagatacaa

SEQ ID NO: 847 - DNA, 345 bp, Streptococcus agalactiae
ggaggattttatatgaaagaacaacaaagaaaagaagaactaaaacggaatcgagaatatgaagttagtctagtcaaagcattgaaaaattcctatgagaatatagaagaaataaaaatcacacatcctgtttcaactgaaattcctggagattggcattgtactgtaaagatttcatttaatgataaaaaatctattgtttataatattacacataatttggaatcgaaaaaaaattatagcggaaattttaatgaaaaaaatatgaatttttttgattcaagaattggtaaaacaaaaaaaactataaaaattattttttcagatggtcaggagaagatacaa

SEQ ID NO: 848 - DNA, 345 bp, Streptococcus agalactiae
ggaggattttatatgaaagaacaacaaagaaaagaagaactaaaacggaatcgagaatatgaagttagtctagtcaaagcattgaaaaattcctatgagaatatagaagaaataaaaatcacacatcctgtttcaactgaaattcctggagattggcattgtactgtaaagatttcatttaatgataaaaaatctattgtttataatattacacataatttggaatcgaaaaaaaattatagcggaaaatttaatgaaaaaaatatgaatttttttgattcaagaattggtaaaacaaaaaaaactataaaaattattttttcagatggtcaggagaagatacaa

SEQ ID NO: 849 - DNA, 345 bp, Streptococcus agalactiae; identical to SEQ ID NO: 848

SEQ ID NO: 850 - DNA, 345 bp, Streptococcus agalactiae; identical to SEQ ID NO: 848

SEQ ID NO: 851 - DNA, 345 bp, Streptococcus agalactiae; identical to SEQ ID NO: 848

SEQ ID NO: 852 - DNA, 345 bp, Streptococcus agalactiae; identical to SEQ ID NO: 847

SEQ ID NO: 853 - DNA, 345 bp, Streptococcus agalactiae
ggaggattttatatgaaagaacaacaaagaaaagaagaactaaaacggaatcgagaatatgaagttagtctagtcaaagcattgaaaaattcctatgagaatatagaagaaataaaaatcacacatcctgtttcaactgaaattcctggagattggcattgtactgtaaagatttcatttaatgataaaaaatctattgtttataatattacacataatttggaatcgaaaaaaaattatagtggaaaatttaatgaaaaaaatatgaatttttttgattcaagaattggtaaaacaaaaaaaactataaaaattattttttcagatggtcaggagaagatacaa

SEQ ID NO: 854 - DNA, 345 bp, Streptococcus agalactiae; identical to SEQ ID NO: 848

SEQ ID NO: 855 - protein, 135 aa, Streptococcus agalactiae
MKKSTQIILLIVALFILVFSGGFYMKEQQRKEELKRNREYEVSLVKALKNSYENIEEIKITHPVSTEIPGDWHCTVKISFNDKKSIVYNITHNLESKKNYSGKFNEKNMNFFDSRIGKTKKTIKIIFSDGQEKIQ

SEQ ID NO: 856 - protein, 115 aa, Streptococcus agalactiae
GGFYMKEQQRKEELKRNREYEVSLVKALKNSYENIEEIKITHPVSTEIPGDWHCTVKISFNDKKSIVYNITHNLESKKNYSGNFNEKNMNFFDSRIGKTKKTIKIIFSDGQEKIQ

SEQ ID NO: 857 - protein, 115 aa, Streptococcus agalactiae
GGFYMKEQQRKEELKRNREYEVSLVKALKNSYENIEEIKITHPVSTEIPGDWHCTVKISFNDKKSIVYNITHNLESKKNYSGKFNEKNMNFFDSRIGKTKKTIKIIFSDGQEKIQ

SEQ ID NO: 858 - protein, 115 aa, Streptococcus agalactiae; identical to SEQ ID NO: 857

SEQ ID NO: 859 - protein, 115 aa, Streptococcus agalactiae; identical to SEQ ID NO: 857

SEQ ID NO: 860 - protein, 115 aa, Streptococcus agalactiae; identical to SEQ ID NO: 856

SEQ ID NO: 861 - protein, 115 aa, Streptococcus agalactiae; identical to SEQ ID NO: 857

SEQ ID NO: 862 - protein, 115 aa, Streptococcus agalactiae; identical to SEQ ID NO: 857

SEQ ID NO: 863 - protein, 115 aa, Streptococcus agalactiae; identical to SEQ ID NO: 857

SEQ ID NO: 864 - DNA, 672 bp, Streptococcus agalactiae
ttgacaaggcatataaaaatttctatactaaatttacaaaatgaaggagagggaactatggaaatactgattgcaggtggtagtggttttttaggaaagcagataataaaagcagcgcttacaaaagggcataaagtggcttacttatcaagacatgaaggtaaaggtgatatatttaaggatcctagattaacctacattaggggagatattacagaagctgataagattcatttagaagacagaacttttgatatattaattgactgtattggagcgattaagcccaatcaactagatgagcttaacgttaaagcaacccaaaaagcagtagcactctgtcacaaaaatcaaataccaaagttagtttatatttcagccaacagcggctattcagcttacattaaaagtaaaaggaaggcagagcagataatcaaagcaagcggtctggattatctttttgtaagaccaggtttgatgtatggtgaagagcgacctctctcgattttccaagccaagtgtataaagttatttagtcatttgcctttcttaggtattgttgtacaaaaggtctttccaactaaggttgtgatagtggcagaagcaatcgttactacgcttaggaaaaaaccaacccaaaaaatcctttctattgaagaattaaataataaa

SEQ ID NO: 865 - DNA, 669 bp, Streptococcus agalactiae
acaaggcatataaaaatttctatactaaatttacaaaatgaaggagagggaactatggaaatactgattgcaggtggtagtggttttttaggaaagcagataataaaagcagcgcttacaaaagggcataaagtggcttacttatcaagacatgaaggtaaaggtgatatatttaaggatcctagattaacctacattaggggagatattacagaagctgataagattcatttagaagacagaacttttgatatattaattgactgtattggagcgattaagcccaatcaactagatgagcttaacgttaaagcaacccaaaaagcagtagcactctgtcacaaaaatcaaataccaaagttagtttatatttcagccaacagcggctattcagcttacattaaaagtaaaaggaaggcagagcagataatcaaagcaagcggtctggattatctttttgtaagaccaggtttgatgtatggtgaagagcgacctctctcgattttccaagccaagtgtataaagttatttagtcatttgcctttcttaggtattgttgtacaaaaggtctttccaactaaggttgtgatagtggcagaagcaatcgttactacgcttaggaaaaaaccaacccaaaaaatcctttctattgaagaattaaataataaa

SEQ ID NO: 866 - DNA, 669 bp, Streptococcus agalactiae; identical to SEQ ID NO: 865

SEQ ID NO: 867 - DNA, 661 bp, Streptococcus agalactiae
tataaaaatttctatactaaatttacaaaatgaaggagagggaactatggaaatactgattgcaggtggtagtggttttttaggaaagcagataataaaagcagcgcttacaaaagggcataaagtggcttacttatcaagacatgaaggtaaaggtgatatatttaaggatcctagattaacctacattaggggagatattacagaagctgataagattcatttagaagacagaacttttgatatattaattgactgtattggagcgattaagcccaatcaactagatgagcttaacgttaaagcaacccaaaaagcagtagcactctgtcacaaaaatcaaataccaaagttagtttatatttcagccaacagcggctattcagcttacattaaaagtaaaaggaaggcagagcagataatcaaagcaagcggtctggattatctttttgtaagaccaggtttgatgtatggtgaagagcgacctctctcgattttccaagccaagtgtataaagttatttagtcatttgcctttcttaggtattgttgtacaaaaggtctttccaactaaggttgtgatagtggcagaagcaatcgttactacgcttaggaaaaaaccaacccaaaaaatcctttctattgaagaattaaataataaa

SEQ ID NO: 868 - DNA, 669 bp, Streptococcus agalactiae; identical to SEQ ID NO: 865

SEQ ID NO: 869 - DNA, 636 bp, Streptococcus agalactiae
caaaatgaaggagagggaactatggaaatactgattgcaggtggtagtggttttctagggaagcagataataaaagcagcgcttacaaaagggcataaggtggcttacttatcaaggcatgaaggtaaaggtgatatatttaaggatcctagattaacctacattaagggagatattacagaagctgataagattcatttagaacatagaaattttgatatattaattgactgtattggagcgattaagcccaatcaactagatgagcttaacgttaaagcaacccaaaaagcagtagcactctgtcacaaaaatcaaataccaaagttagtttacatttcagccaatagcggctattcagcttacattaaaagtaaaaggaaggcagagcagataatcaaagcaagcggtctggattatctttttgtaagaccaggtttgatgtatggtgaagagcgacctctctcgattttccaagccaagtgtataaaattatttagtcatttgcctttcttaggtattgttgtacaaaaagtctttccaactaaggttgtgatagtggcagaagcaatcgttacttcgcttaggaaaaaaccaactcaaaaaatcctttctattgaagaattaaataataaa

SEQ ID NO: 870 - DNA, 669 bp, Streptococcus agalactiae
acaaggcatataaaaatttctatactaaatttacaaaatgaaggagagggaactatggaaatactgattgcaggtggtagtggttttctagggaagcagataataaaagcagcgcttacaaaagggcataaggtggcttacttatcaaggcatgaaggtaaaggtgatatatttaaggatcctagattaacctacattaagggagatattacagaagctgataagattcatttagaacatagaaattttgatatattaattgactgtattggagcgattaagcccaatcaactagatgagcttaacgttaaagcaacccaaaaagcagtagcactctgtcacaaaaatcaaataccaaagttagtttacatttcagccaatagcggctattcagcttacattaaaagtaaaaggaaggcagagcagataatcaaagcaagcggtctggattatctttttgtaagaccaggtttgatgtatggtgaagagcgacctctctcgattttccaagccaagtgtataaaattatttagtcatttgcctttcttaggtattgttgtacaaaaagtctttccaactaaggttgtgatagtggcagaagcaatcgttacttcgcttaggaaaaaaccaactcaaaaaatcctttctattgaagaattaaataataaa

SEQ ID NO: 871 - DNA, 669 bp, Streptococcus agalactiae; identical to SEQ ID NO: 870

SEQ ID NO: 872 - DNA, 669 bp, Streptococcus agalactiae
acaaggcatataaaaatttctatactaaatttacaaaatgaaggagagggaactatggaaatactgattgcaggtggtagtggttttttaggaaagcagataataaaagcagcgcttacaaaagggcataagttggcttacttatcaagacatgaaggtaaaggtgatatatttaaggatcctagattaacctacattaagggagatattacagaagctgataagattcatttagaagacagaacttttgatatattaattgactgtattggagcgattaagcccaatcaactagatgagcttaacgttaaagcaacccaaaaagcagtagcactctgtcacaaaaatcaaataccaaagttagtttacatttcagccaacagcggctattcagcttacattagaagtaaaaggaaggcagagcagataatcaaagcaagcggtctggattatctttttgtaagaccaggtttgatgtatggtgaagagcgacctctctcgattttccaagccaagtgtataaaattatttagtcatttgcctttcttaggtattgttgtacaaaaggtctttccaactaaggttgtgatagtggcagaagcaatcgttactacgcttaggacaaaaccaactcaaaaaatcctttctattgaagaattaaataataaa

SEQ ID NO: 873 - DNA, 669 bp, Streptococcus agalactiae; identical to SEQ ID NO: 865

SEQ ID NO: 874 - DNA, 669 bp, Streptococcus agalactiae; identical to SEQ ID NO: 865

SEQ ID NO: 875 - protein, 223 aa, Streptococcus agalactiae
TRHIKISILNLQNEGEGTMEILIAGGSGFLGKQIIKAALTKGHKVAYLSRHEGKGDIFKDPRLTYIRGDITEADKIHLEDRTFDILIDCIGAIKPNQLDELNVKATQKAVALCHKNQIPKLVYISANSGYSAYIKSKRKAEQIIKASGLDYLFVRPGLMYGEERPLSIFQAKCIKLFSHLPFLGIVVQKVFPTKVVIVAEAIVTTLRKKPTQKILSIEELNNK

SEQ ID NO: 876 - protein, 223 aa, Streptococcus agalactiae; identical to SEQ ID NO: 875

SEQ ID NO: 877 - protein, 223 aa, Streptococcus agalactiae; identical to SEQ ID NO: 875

SEQ ID NO: 878 - protein, 220 aa, Streptococcus agalactiae
IKISILNLQNEGEGTMEILIAGGSGFLGKQIIKAALTKGHKVAYLSRHEGKGDIFKDPRLTYIRGDITEADKIHLEDRTFDILIDCIGAIKPNQLDELNVKATQKAVALCHKNQIPKLVYISANSGYSAYIKSKRKAEQIIKASGLDYLFVRPGLMYGEERPLSIFQAKCIKLFSHLPFLGIVVQKVFPTKVVIVAEAIVTTLRKKPTQKILSIEELNNK

SEQ ID NO: 879 - protein, 223 aa, Streptococcus agalactiae; identical to SEQ ID NO: 875

SEQ ID NO: 880 - protein, 212 aa, Streptococcus agalactiae
QNEGEGTMEILIAGGSGFLGKQIIKAALTKGHKVAYLSRHEGKGDIFKDPRLTYIKGDITEADKIHLEHRNFDILIDCIGAIKPNQLDELNVKATQKAVALCHKNQIPKLVYISANSGYSAYIKSKRKAEQIIKASGLDYLFVRPGLMYGEERPLSIFQAKCIKLFSHLPFLGIVVQKVFPTKVVIVAEAIVTSLRKKPTQKILSIEELNNK

SEQ ID NO: 881 - protein, 223 aa, Streptococcus agalactiae
TRHIKISILNLQNEGEGTMEILIAGGSGFLGKQIIKAALTKGHKVAYLSRHEGKGDIFKDPRLTYIKGDITEADKIHLEHRNFDILIDCIGAIKPNQLDELNVKATQKAVALCHKNQIPKLVYISANSGYSAYIKSKRKAEQIIKASGLDYLFVRPGLMYGEERPLSIFQAKCIKLFSHLPFLGIVVQKVFPTKVVIVAEAIVTSLRKKPTQKILSIEELNNK

SEQ ID NO: 882 - protein, 223 aa, Streptococcus agalactiae; identical to SEQ ID NO: 881

SEQ ID NO: 883 - protein, 223 aa, Streptococcus agalactiae
TRHIKISILNLQNEGEGTMEILIAGGSGFLGKQIIKAALTKGHKLAYLSRHEGKGDIFKDPRLTYIKGDITEADKIHLEDRTFDILIDCIGAIKPNQLDELNVKATQKAVALCHKNQIPKLVYISANSGYSAYIRSKRKAEQIIKASGLDYLFVRPGLMYGEERPLSIFQAKCIKLFSHLPFLGIVVQKVFPTKVVIVAEAIVTTLRTKPTQKILSIEELNNK

SEQ ID NO: 884 - protein, 223 aa, Streptococcus agalactiae; identical to SEQ ID NO: 875

SEQ ID NO: 885 - protein, 223 aa, Streptococcus agalactiae; identical to SEQ ID NO: 875

SEQ ID NO: 886 - DNA, 1346 bp, Streptococcus agalactiae
caataacaacatttgaaaataaaaaagttttagtccttggtttagcacgatctggagaagccgctgcacgtttgttagctaagttaggagcaatagtgacagttaatgatggcaaaccatttgatgaaaatccaacagcacagtctttgttggaagagggtattaaagtggtttgtggtagtcatcctttagaattgttagatgaggatttttgttacatgattaaaaatccaggaataccttataacaatcctatggtcaaaaaagcattagaaaaacaaatccctgttttgactgaagtggaattagcatacttagtttcagaatctcagctaataggtattacaggctctaacgggaaaacgacaacgacaacgatgattgcagaagtcttaaatgctggaggtcagagaggtttgttagctgggaatatcggctttcctgctagtgaagttgttcaggctgcggatgataaagatattctagttatggaattatcaagttttcagctaatgggagttaaggaatttcgtcctcatattgcagtaattactaatttaatgccaactcatttagattatcatgggtcttttgaagattatgttgctgcaaaatggaatatccaaaatcaaatgtcttcatctgattttttggtacttaattttaatcaaggtatttctaaagagttagctaaaactactaaagcaacaatcgttcctttctctactacggaaaaagttgatggtgcttacgtacaagacaagcaacttttctataaaggggagaatattatgttagtagatgacattggtgtcccaggaagccataacgtagagaatgctctagcaactattgcggttgctaaactagctggtatcagtaatcaagttattagagaaactttaagcaattttggaggtgttaaacaccgcttgcaatcactcggtaaggttcatggtattagtttctataacgacagcaagtcaactaatatattggcaactcaaaaagcattatctggctttgataatactaaagttatcctaattgcaggaggtcttgatcgcggtaatgagtttgatgaattgataccagatatcactggacttaaacatatggttgttttaggggaatcggcatctcgagtaaaacgtgctgcacaaaaagcaggagtaacttatagcgatgctttagatgttagagatgcggtacataaagcttatgaggtggcacaacagggcgatgttatcttgctaagtcctgcaaatgcatcatgggacatgtataagaatttcgaagtccgtggtgatgaattcattgatactttcgaaagtcttagaggagag

SEQ ID NO: 887 - DNA, 1346 bp, Streptococcus agalactiae
  misc_feature 834: n = A,T,C or G
caataacaacatttgaaaataaaaaagttttagtccttggtttagcacgatctggagaagctgctgcacgtttgttagctaagttaggagcaatagtgacagttaatgatggcaaaccatttgatgaaaatccaacagcacagtctttgttggaagagggtattaaagtggtttgtggtagtcatcctttagaattgttagatgaggatttttgttacatgattaaaaatccaggaataccttataacaatcctatggtcaaaaaagcattagaaaaacaaatccctgttttgactgaagtggaattagcatacttagtttcagaatctcagctaataggtattacaggctctaacgggaaaacgacaacgacaacgatgattgcagaagtcttaaatgctggaggtcagagaggtttgttagctgggaatatcggctttcctgctagtgaagttgttcaggctgcgaatgataaagatactctagttatggaattatcaagttttcagctaatgggagttaaggaatttcgtcctcatattgcagtaattactaatttaatgccaactcatttagattatcatgggtcttttgaagattatgttgctgcaaaatggaatatccaaaatcaaatgtcttcatctgattttttggtacttaattttaatcaaggtatttctaaagagttagctaaaactactaaagcaacaatcgttcctttctctactacggaaaaagttgatggtgcttacgtacaagacaagcaacttttctataaaggggagaatattatgtcagtagatgacattggtgtcccaggaagccataacgtanagaatgctctagcaactattgcggttgctaaactggctggtatcagtaatcaagttattagagaaactttaagcaattttggaggtgttaaacaccgcttgcaatcactcggtaaggttcatggtattagtttctataacgacagcaagtcaactaatatattggcaactcaaaaagcattatctggctttgataatactaaagttatcctaattgcaggaggtcttgatcgcggtaatgagtttgatgaattgataccagatatcactggacttaaacatatggttgttttaggggaatcggcatctcgagtaaaacgtgctgcacaaaaagcaggagtaacttatagcgatgctttagatgttagagatgcggtacataaagcttatgaggtggcacaacagggcgatgttatcttgctaagtcctgcaaatgcatcatgggacatgtataagaatttcgaagtccgtggtgatgaattcattgatactttcgaaagtcttagaggagag

SEQ ID NO: 888 - DNA, 999 bp, Streptococcus agalactiae
ggacgagtaatgaaaacaataacaacatttgaaaataaaaaagttttagtccttggtttagcacgatctggagaagctgctgcacgtttgttagctaagttaggagcaatagtgacagttaatgatggcaaaccatttgatgaaaatccaacagcacagtctttgttggaagagggtattaaagtggtttgtggtagtcatcctttagaattgttagatgaggatttttgttacatgattaaaaatccaggaataccttataacaatcctatggtcaaaaaagcattagaaaaacaaatccctgttttgactgaagtggaattagcatacttagtttcagaatctcagctaataggtattacaggctctaacgggaaaacgacaacgacaacgatgattgcagaagtcttaaatgctggaggtcagagaggtttgttagctgggaatatcggctttcctgctagtgaagttgttcaggctgcgaatgataaagatactctagttatggaattatcaagttttcagctaatgggagttaaggaatttcgtcctcatattgcagtaattactaatttaatgccaactcatttagattatcatgggtcttttgaagattatgttgctgcaaaatggaatatccaaaatcaaatgtcttcatctgattttttggtacttaattttaatcaaggtatttctaaagagttagctaaaactactaaagcaacaatcgttcctttctctactacggaaaaagttgatggtgcttacgtacaagacaagcaacttttctataaaggggagaatattatgtcagtagatgacattggtgtcccaggaagccataacgtagagaatgctctagcaactattgcggttgctaaactggctggtatcagtaatcaagttattagagaaactttaagcaattttggaggtgttaaacaccgcttgcaatcactcggtaaggttcatggtattagtttctataacgacagcaag

SEQ ID NO: 889 - DNA, 1362 bp, Streptococcus agalactiae
ggacgagtaatgaaaacaataacaacatttgaaaataaaaaagttttagtccttggtttagcacgatctggagaagctgctgcacgtttgttagctaagttaggagcaatagtgacagttaatgatggcaaaccatttgatgaaaatccaacagcacagtctttgttggaagagggtattaaagtggtttgtggtagtcatcctttagaattgttagatgaggatttttgttacatgattaaaaatccaggaataccttataacaatcctatggtcaaaaaagcattagaaaaacaaatccctgttttgactgaagtggaattagcatacttagtttcagaatctcagctaataggtattacaggctctaacgggaaaacgacaacgacaacgatgattgcagaagtcttaaatgctggaggtcagagaggtttgttagctgggaatatcggctttcctgctagtgaagttgttcaggctgcgaatgataaagatactctagttatggaattatcaagttttcagctaatgggagttaaggaatttcgtcctcatattgcagtaattactaatttaatgccaactcatttagattatcatgggtcttttgaagattatgttgctgcaaaatggaatatccaaaatcaaatgtcttcatctgattttttggtacttaattttaatcaaggtatttctaaagagttagctaaaactactaaagcaacaatcgttcctttctctactacggaaaaagttgatggtgcttacgtacaagacaagcaacttttctataaaggggagaatattatgtcagtagatgacattggtgtcccaggaagccataacgtagagaatgctctagcaactattgcggttgctaaactggctggtatcagtaatcaagttattagagaaactttaagcaattttggaggtgttaaacaccgcttgcaatcactcggtaaggttcatggtattagtttctataacgacagcaagtcaactaatatattggcaactcaaaaagcattatctggctttgataatactaaagttatcctaattgcaggaggtcttgatcgcggtaatgagtttgatgaattgataccagatatcactggacttaaacatatggttgttttaggggaatcggcatctcgagtaaaacgtgctgcacaaaaagcaggagtaacttatagcgatgctttagatgttagagatgcggtacataaagcttatgaggtggcacaacagggcgatgttatcttgctaagtcctgcaaatgcatcatgggacatgtataagaatttcgaagtccgtggtgatgaattcattgatactttcgaaagtcttagaggagag

SEQ ID NO: 890 - DNA, 1362 bp, Streptococcus agalactiae
ggacgagtaatgaaaacaataacaacatttgaaaataaaaaagttttagtccttggtttagcacgatctggagaagccgctgcacgtttgttagctaagttaggagcaatagtgacagttaatgatggcaaaccatttgatgaaaatccaacagcacagtctttgttggaagagggtattaaagtggtttgtggtagtcatcctttagaattgttagatgaggatttttgttacatgattaaaaatccaggaataccttataacaatcctatggtcaaaaaagcattagaaaaacaaatccctgttttgactgaagtggaattagcatacttagtttcagaatctcagctaataggtattacaggctctaacgggaaaacgacaacgacaacgatgattgcagaagtcttaaatgctggaggtcagagaggtttgttagctgggaatatcggctttcctgctagtgaagttgttcaggctgcggatgataaagatattctagttatggaattatcaagttttcagctaatgggagttaaggaatttcgtcctcatattgcagtaattactaatttaatgccaactcatttagattatcatgggtcttttgaagattatgttgctgcaaaatggaatatccaaaatcaaatgtcttcatctgattttttggtacttaattttaatcaaggtatttctaaagagttagctaaaactactaaagcaacaatcgttcctttctctactacggaaaaagttgatggtgcttacgtacaagacaagcaacttttctataaaggggagaatattatgtcagtagatgacattggtgtcccaggaagccataacgtagagaatgctctagcaactattgcggttgctaaactagctggtatcagtaatcaagttattagagaaactttaagcaattttggaggtgttaaacaccgcttgcaatcactcggtaaggttcatggtattagtttctataacgacagcaagtcaactaatatattggcaactcaaaaagcattatctggctttgataatactaaagttatcctaattgcaggaggtcttgatcgcggtaatgagtttgatgaattgataccagatatcactggacttaaacatatggttgttttaggggaatcggcatctcgagtaaaacgtgctgcacaaaaagcaggagtaacttatagcgatgctttagatgttagagatgcggtacataaagcttatgaggtggcacaacagggcgatgttatcttgctaagtcctgcaaatgcatcatgggacatgtataagaatttcgaagtccgtggtgatgaattcattgatactttcgaaagtcttagaggagag

SEQ ID NO: 891 - DNA, 1348 bp, Streptococcus agalactiae
ggacgagtaatgaaaacaataacaacatttgaaaataaaaaagttttagtccttggtttagcacgatctggagaagccgctgcacgtttgttagctaagttaggagcaatagtgacagttaatgatggcaaaccatttgatgaaaatccaacagcacagtctttgttggaagagggtattaaagtggtttgtggtagtcatcctttagaattgttagatgaggatttttgttacatgattaaaaatccaggaataccttataacaatcctatggtcaaaaaagcattagaaaaacaaatccctgttttgactgaagtggaattagcatacttagtttcagaatctcagctaataggtattacaggctctaacgggaaaacgacaacgacaacgatgattgcagaagtcttaaatgctggaggtcagagaggtttgttagctgggaatatcggctttcctgctagtgaagttgttcaggctgcggatgataaagatattctagttatggaattatcaagttttcagctaatgggagttaaggaatttcgtcctcatattgcagtaattactaatttaatgccaactcatttagattatcatgggtcttttgaagattatgttgctgcaaaatggaatatccaaaatcaaatgtcttcatctgattttttggtacttaattttaatcaaggtatttctaaagagttagctaaaactactaaagcaacaatcgttcctttctctactacggaaaaagttgatggtgcttacgtacaagacaagcaacttttctataaaggggagaatattatgtcagtagatgacattggtgtcccaggaagccataacgtagagaatgctctagcaactattgcggttgctaaactagctggtatcagtaatcaagttattagagaaactttaagcaattttggaggtgttaaacaccgcttgcaatcactcggtaaggttcatggtattagtttctataacgacagcaagtcaactaatatattggcaactcaaaaagcattatctggctttgataatactaaagttatcctaattgcaggaggtcttgatcgcggtaatgagtttgatgaattgataccagatatcactggacttaaacatatggttgttttaggggaatcggcatctcgagtaaaacgtgctgcacaaaaagcaggagtaacttatagcgatgctttagatgttagagatgcggtacataaagcttatgaggtggcacaacagggcgatgttatcttgctaagtcctgcaaatgcatcatgggacatgtataagaatttcgaagtccgtggtgatgaattcattgatactttcgaaa

SEQ ID NO: 892 - DNA, 1362 bp, Streptococcus agalactiae; identical to SEQ ID NO: 890

SEQ ID NO: 893 - DNA, 1362 bp, Streptococcus agalactiae
ggacgagtaatgaaaacaataacaacatttgaaaataaaaaagttttagtccttggtttagcacgatctggagaagccgctgcacgtttgttagctaagttaggagcaatagtgacagttaatgatggcaaaccatttgatgaaaatccaacagcacagtctttgttggaagagggtattaaagtggtttgtggtagtcatcctttagaattgttagatgaggatttttgttacatgattaaaaatccaggaataccttataacaatcctatggtcaaaaaagcattagaaaaacaaatccctgttttgactgaagtggaattagcatacttagtttcagaatctcagctaataggtattacaggctctaacgggaaaacgacaacgacaacgatgattgcagaagtcttaaatgctggaggtcagagaggtttgttagctgggaatatcggctttcctgctagtgaagttgttcaggctgcggatgataaagatattctagttatggaattatcaagttttcagctaatgggagttaaggaatttcgtcctcatattgcagtaattactaatttaatgccaactcatttagattatcatgggtcttttgaagaatatgttgctgcaaaatggaatatccaaaatcaaatgtcttcatctgattttttggtacttaattttaatcaaggtatttctaaagagttagctaaaactactaaagcaacaatcgttcctttctctactacggaaaaagttgatggtgcttacgtacaagacaagcaacttttctataaaggggagaatattatgttagtagatgacattggtgtcccaggaagccataacgtagagaatgctctagcaactattgcggttgctaaactagctggtatcagtaatcaagttattagagaaactttaagcaattttggaggtgttaaacaccgcttgcaatcactcggtaaggttcatggtattagtttctataatgacagcaagtcaactaatatattggcaactcaaaaagcattatctggctttgataatactaaagttatcctaattgcaggaggtcttgatcgcggtaatgagtttgatgaattgataccagatatcactggacttaaacatatggttgttttaggggaatcggcatctcgagtaaaacgtgctgcacaaaaagcaggagtaacttatagcgatgctttagatgttagagatgcggtacataaagcttatgaggtggcacaacagggcgatgttatcttgctaagtcctgcaaatgcatcatgggacatgtataagaatttcgaagtccgtggtgatgaattcattgatactttcgaaagtcttagaggagag

SEQ ID NO: 894 - DNA, 1329 bp, Streptococcus agalactiae
caataacaacatttgaaaataaaaaagttttagtccttggtttagcacgatctggagaagccgctgcacgtttgttagctaagttaggagcaatagtgacagttaatgatggcaaaccatttgatgaaaatccaacagcacagtctttgttggaagagggtattaaagtggtttgtggtagtcatcctttagaattgttagatgaggatttttgttacatgattaaaaatccaggaataccttataacaatcctatggtcaaaaaagcattagaaaaacaaatccctgttttgactgaagtggaattagcatacttagtttcagaatctcagctaataggtattacaggctctaacgggaaaacgacaacgacaacgatgattgcagaagtcttgaatgctggaggtcagagaggtttgttagctgggaatatcggctttcctgctagtgaagttgttcaggctgcggatgataaagatactctagttatggaattatcaagttttcagctaatgggagttaaggaatttcgtcctcatattgcagtaattactaatttaatgccaactcatttagattatcatgggtcttttgaagattatgttgctgcaaaatggaatatccaaaatcaaatgtcttcatctgattttttggtacttaattttaatcaaggtatttctaaagagttagctaaaactactaaagcaacaatcgttcctttctctactacggaaaaagttgatggtgcttacgtacaagacaagcaacttttctataaaggggagaatattatgtcagtagacgacattggtgtcccaggaagccataacgtagagaatgctctagcaactattgcggttgctaaactagctggtatcagtaatcaagttattagagaaactttaagcaattttggaggtgttaaacaccgcttgcaatcactcggtaaggttcatggtattagtttctataacgacagtaagtcaactaatatattggcaactcaaaaagcattatctggctttgataatactaaagttatcctaattgcaggaggtcttgatcgcggtaatgagtttgatgaattgataccagatatcactggacttaagcatatggttgttttaggggaatcggcatctcgagtaaaacgtgctgcacaaaaagcaggagtaacttatagcaatgctttagatgttagagatgcggtacataaagcttatgaggtggcacaacagggcgatgttatcttgttmagtcctgcgaatgcatcatgggacatgtataagaatttcgaagtccgtggtgatgaattcattgatactttcg

SEQ ID NO: 895 - DNA, 1362 bp, Streptococcus agalactiae
ggacgagtaatgaaaacaataacaacatttgaaaataaaaaagttttagtccttggtttagcacgatctggagaagctgctgcacgtttgttagctaagttaggagcaatagtgacagttaatgatggcaaaccatttgatgaaaatccaacagcacagtctttgttggaagagggtattaaagtggtttgtggtagtcatcctttagaattgttagatgaggatttttgttacatgattaaaaatccaggaataccttataacaatcctatggtcaaaaaagcattagaaaaacaaatccctgttttgactgaagtggaattagcatacttagtttcagaatctcagctaataggtattacaggctctaacgggaaaacgacaacgacaacgatgattgcagaagtcttaaatgctggaggtcagagaggtttgttagctgggaatatcggctttcctgctagtgaagttgttcaggctgcgaatgataaagatactctagttatggaattatcaagttttcagctaatgggagttaaggaatttcgtcctcatattgcagtaattactaatttaatgccaactcatttagattatcatgggtcttttgaagattatgttgctgcaaaatggaatatccaaaatcaaatgtcttcatctgattttttggtacttaattttaatcaaggtatttctaaagagttagctaaaactactaaagcaacaatcgttcctttctctactacggaaaaagttgatggtgcttacgtacaagacaagcaacttttctataaaggggagaatattatgtcagtagatgacattggtgtcccaggaagccataacgtagagaatgctctagcaactattgcggttgctaaactggctggtatcagtaatcaagttattagagaaactttaagcaattttggaggtgttaaacaccgcttgcaatcactcggtaaggttcatggtattagtttctataacgacagcaagtcaactaatatattggcaactcaaaaagcattatctggctttgataatactaaagttatcctaattgcaggaggtcttgatcgcagtaatgagtttgatgaattgataccagatatcactggacttaaacatatggttgttttaggggaatcggcatctcgagtaaaacgtgctgcacaaaaagcaggagtaacttatagcgatgctttagatgttagagatgcggtacataaagcttatgaggtggcacaacagggcgatgttatcttgctaagtcctgcaaatgcatcatgggacatgtataagaatttcgaagtccgtggtgatgaattcattgatactttcgaaagtcttagaggagag

SEQ ID NO: 896 - DNA, 1362 bp, Streptococcus agalactiae; identical to SEQ ID NO: 889

SEQ ID NO: 897 - protein, 448 aa, Streptococcus agalactiae
ITTFENKKVLVLGLARSGEAAARLLAKLGAIVTVNDGKPFDENPTAQSLLEEGIKVVCGSHPLELLDEDFCYMIKNPGIPYNNPMVKKALEKQIPVLTEVELAYLVSESQLIGITGSNGKTTTTTMIAEVLNAGGQRGLLAGNIGFPASEVVQAADDKDILVMELSSFQLMGVKEFRPHIAVITNLMPTHLDYHGSFEDYVAAKWNIQNQMSSSDFLVLNFNQGISKELAKTTKATIVPFSTTEKVDGAYVQDKQLFYKGENIMLVDDIGVPGSHNVENALATIAVAKLAGISNQVIRETLSNFGGVKHRLQSLGKVHGISFYNDSKSTNILATQKALSGFDNTKVILIAGGLDRGNEFDELIPDITGLKHMVVLGESASRVKRAAQKAGVTYSDALDVRDAVHKAYEVAQQGDVILLSPANASWDMYKNFEVRGDEFIDTFESLRGE

SEQ ID NO: 898 - protein, 448 aa, Streptococcus agalactiae
  VARIANT 278: Xaa = Any Amino Acid
ITTFENKKVLVLGLARSGEAAARLLAKLGAIVTVNDGKPFDENPTAQSLLEEGIKVVCGSHPLELLDEDFCYMIKNPGIPYNNPMVKKALEKQIPVLTEVELAYLVSESQLIGITGSNGKTTTTTMIAEVLNAGGQRGLLAGNIGFPASEVVQAANDKDTLVMELSSFQLMGVKEFRPHIAVITNLMPTHLDYHGSFEDYVAAKWNIQNQMSSSDFLVLNFNQGISKELAKTTKATIVPFSTTEKVDGAYVQDKQLFYKGENIMSVDDIGVPGSHNVXNALATIAVAKLAGISNQVIRETLSNFGGVKHRLQSLGKVHGISFYNDSKSTNILATQKALSGFDNTKVILIAGGLDRGNEFDELIPDITGLKHMVVLGESASRVKRAAQKAGVTYSDALDVRDAVHKAYEVAQQGDVILLSPANASWDMYKNFEVRGDEFIDTFESLRGE

SEQ ID NO: 899 - protein, 333 aa, Streptococcus agalactiae
GRVMKTITTFENKKVLVLGLARSGEAAARLLAKLGAIVTVNDGKPFDENPTAQSLLEEGIKVVCGSHPLELLDEDFCYMIKNPGIPYNNPMVKKALEKQIPVLTEVELAYLVSESQLIGITGSNGKTTTTTMIAEVLNAGGQRGLLAGNIGFPASEVVQAANDKDTLVMELSSFQLMGVKEFRPHIAVITNLMPTHLDYHGSFEDYVAAKWNIQNQMSSSDFLVLNFNQGISKELAKTTKATIVPFSTTEKVDGAYVQDKQLFYKGENIMSVDDIGVPGSHNVENALATIAVAKLAGISNQVIRETLSNFGGVKHRLQSLGKVHGISFYNDSK

SEQ ID NO: 900 - protein, 454 aa, Streptococcus agalactiae
GRVMKTITTFENKKVLVLGLARSGEAAARLLAKLGAIVTVNDGKPFDENPTAQSLLEEGIKVVCGSHPLELLDEDFCYMIKNPGIPYNNPMVKKALEKQIPVLTEVELAYLVSESQLIGITGSNGKTTTTTMIAEVLNAGGQRGLLAGNIGFPASEVVQAANDKDTLVMELSSFQLMGVKEFRPHIAVITNLMPTHLDYHGSFEDYVAAKWNIQNQMSSSDFLVLNFNQGISKELAKTTKATIVPFSTTEKVDGAYVQDKQLFYKGENIMSVDDIGVPGSHNVENALATIAVAKLAGISNQVIRETLSNFGGVKHRLQSLGKVHGISFYNDSKSTNILATQKALSGFDNTKVILIAGGLDRGNEFDELIPDITGLKHMVVLGESASRVKRAAQKAGVTYSDALDVRDAVHKAYEVAQQGDVILLSPANASWDMYKNFEVRGDEFIDTFESLRGE

SEQ ID NO: 901 - protein, 454 aa, Streptococcus agalactiae
GRVMKTITTFENKKVLVLGLARSGEAAARLLAKLGAIVTVNDGKPFDENPTAQSLLEEGIKVVCGSHPLELLDEDFCYMIKNPGIPYNNPMVKKALEKQIPVLTEVELAYLVSESQLIGITGSNGKTTTTTMIAEVLNAGGQRGLLAGNIGFPASEVVQAADDKDILVMELSSFQLMGVKEFRPHIAVITNLMPTHLDYHGSFEDYVAAKWNIQNQMSSSDFLVLNFNQGISKELAKTTKATIVPFSTTEKVDGAYVQDKQLFYKGENIMSVDDIGVPGSHNVENALATIAVAKLAGISNQVIRETLSNFGGVKHRLQSLGKVHGISFYNDSKSTNILATQKALSGFDNTKVILIAGGLDRGNEFDELIPDITGLKHMVVLGESASRVKRAAQKAGVTYSDALDVRDAVHKAYEVAQQGDVILLSPANASWDMYKNFEVRGDEFIDTFESLRGE

SEQ ID NO: 902 - protein, 449 aa, Streptococcus agalactiae
GRVMKTITTFENKKVLVLGLARSGEAAARLLAKLGAIVTVNDGKPFDENPTAQSLLEEGIKVVCGSHPLELLDEDFCYMIKNPGIPYNNPMVKKALEKQIPVLTEVELAYLVSESQLIGITGSNGKTTTTTMIAEVLNAGGQRGLLAGNIGFPASEVVQAADDKDILVMELSSFQLMGVKEFRPHIAVITNLMPTHLDYHGSFEDYVAAKWNIQNQMSSSDFLVLNFNQGISKELAKTTKATIVPFSTTEKVDGAYVQDKQLFYKGENIMSVDDIGVPGSHNVENALATIAVAKLAGISNQVIRETLSNFGGVKHRLQSLGKVHGISFYNDSKSTNILATQKALSGFDNTKVILIAGGLDRGNEFDELIPDITGLKHMVVLGESASRVKRAAQKAGVTYSDALDVRDAVHKAYEVAQQGDVILLSPANASWDMYKNFEVRGDEFIDTFE

SEQ ID NO: 903 - protein, 454 aa, Streptococcus agalactiae; identical to SEQ ID NO: 901

SEQ ID NO: 904 - protein, 454 aa, Streptococcus agalactiae
GRVMKTITTFENKKVLVLGLARSGEAAARLLAKLGAIVTVNDGKPFDENPTAQSLLEEGIKVVCGSHPLELLDEDFCYMIKNPGIPYNNPMVKKALEKQIPVLTEVELAYLVSESQLIGITGSNGKTTTTTMIAEVLNAGGQRGLLAGNIGFPASEVVQAADDKDILVMELSSFQLMGVKEFRPHIAVITNLMPTHLDYHGSFEEYVAAKWNIQNQMSSSDFLVLNFNQGISKELAKTTKATIVPFSTTEKVDGAYVQDKQLFYKGENIMLVDDIGVPGSHNVENALATIAVAKLAGISNQVIRETLSNFGGVKHRLQSLGKVHGISFYNDSKSTNILATQKALSGFDNTKVILIAGGLDRGNEFDELIPDITGLKHMVVLGESASRVKRAAQKAGVTYSDALDVRDAVHKAYEVAQQGDVILLSPANASWDMYKNFEVRGDEFIDTFESLRGE

SEQ ID NO: 905 - protein, 442 aa, Streptococcus agalactiae
  VARIANT 418: Xaa = Any Amino Acid
ITTFENKKVLVLGLARSGEAAARLLAKLGAIVTVNDGKPFDENPTAQSLLEEGIKVVCGSHPLELLDEDFCYMIKNPGIPYNNPMVKKALEKQIPVLTEVELAYLVSESQLIGITGSNGKTTTTTMIAEVLNAGGQRGLLAGNIGFPASEVVQAADDKDTLVMELSSFQLMGVKEFRPHIAVITNLMPTHLDYHGSFEDYVAAKWNIQNQMSSSDFLVLNFNQGISKELAKTTKATIVPFSTTEKVDGAYVQDKQLFYKGENIMSVDDIGVPGSHNVENALATIAVAKLAGISNQVIRETLSNFGGVKHRLQSLGKVHGISFYNDSKSTNILATQKALSGFDNTKVILIAGGLDRGNEFDELIPDITGLKHMVVLGESASRVKRAAQKAGVTYSNALDVRDAVHKAYEVAQQGDVILXSPANASWDMYKNFEVRGDEFIDTF

SEQ ID NO: 906 - protein, 454 aa, Streptococcus agalactiae
GRVMKTITTFENKKVLVLGLARSGEAAARLLAKLGAIVTVNDGKPFDENPTAQSLLEEGIKVVCGSHPLELLDEDFCYMIKNPGIPYNNPMVKKALEKQIPVLTEVELAYLVSESQLIGITGSNGKTTTTTMIAEVLNAGGQRGLLAGNIGFPASEVVQAANDKDTLVMELSSFQLMGVKEFRPHIAVITNLMPTHLDYHGSFEDYVAAKWNIQNQMSSSDFLVLNFNQGISKELAKTTKATIVPFSTTEKVDGAYVQDKQLFYKGENIMSVDDIGVPGSHNVENALATIAVAKLAGISNQVIRETLSNFGGVKHRLQSLGKVHGISFYNDSKSTNILATQKALSGFDNTKVILIAGGLDRSNEFDELIPDITGLKHMVVLGESASRVKRAAQKAGVTYSDALDVRDAVHKAYEVAQQGDVILLSPANASWDMYKNFEVRGDEFIDTFESLRGE

SEQ ID NO: 907 - protein, 454 aa, Streptococcus agalactiae; identical to SEQ ID NO: 900

SEQ ID NO: 908 - DNA, 825 bp, Streptococcus agalactiae
atggctaaagagagggtagatgttcttgcctataaacagggactttttgatacacgagagcaagcgaaacgtggtgttatggcaggaatggtgattaacgttatcaatggagaacgttatgataaaccaggtgaaaaggttgcagacgatactgaattaaaactaaaaggtgaaaaactaaaatatgttagtagaggtggattgaaattagaaaaagctttacaagtttttgaaatttcagttgcagataagctaactatagatattggcgcctctacgggtggttttactgatgttatgctacaatcaggagcgcgtttagtttacgcagtagatgtaggaacaaatcaattagtttggaagttacgtcaggatcatcgtgttcgttctatggaacaatataattttaggtatgcccaaaaagaagatttcaaggagggactgcctgaatttgcatcgatagatgtctcatttatctctcttaatttgattttaccagctctaaaagaaattttagtggatggtggacaagtagtggcattaattaaaccacaatttgaagcaggtcgtgagcaaattggtaaaaatggtattgtcaaagacaagttggttcatgaaaaggttttgacaacagtgaccaatttcacgaaagattatggatatacggttaaacatcttgatttttcgcccattcaaggtggacatggaaatattgagtttttaatgcatttgcaaaagtgtcaagatccacaaaatcttgtgcttgaccaaatacaagatgttatagaaaaagcacataaggaatttaagaaaaatgaagaagag

SEQ ID NO: 909 - DNA, 822 bp, Streptococcus agalactiae
gctaaagagagggtagatgttcttgcctataaacagggactttttgatacacgagagcaagcgaaacgtggtgttatggcaggaatggtgattaacgttatcaatggagaacgttatgataaaccaggtgaaaaggttgcagacgatactgaattaaaactaaaaggtgaaaaactaaaatatgttagtagaggtggattgaaattagaaaaagctttacaagtttttgaaatttcagttgcagataagctaactatagatattggcgcctctacgggtggttttactgatgttatgctacaatcaggagcgcgtttagtttacgcagtagatgtaggaacaaatcaattagtttggaagttacgtcaggatcatcgtgttcgttctatggaacaatataattttaggtatgcccaaaaagaagatttcaaggagggactgcctgaatttgcatcgatagatgtctcatttatctctcttaatttgattttaccagctctaaaagaaattttagtggatggtggacaagtagtggcattaattaaaccacaatttgaagcaggtcgtgagcaaattggtaaaaatggtattgtcaaagacaagttggttcatgaaaaggttttgacaacagtgaccaatttcacgaaagattatggatatacggttaaacatcttgatttttcgcccattcaaggtggacatggaaatattgagtttttaatgcatttgcaaaagtgtcaagatccacaaaatcttgtgcttgaccaaatacaagatgttatagaaaaagcacataaggaatttaagaaaaatgaagaagag

SEQ ID NO: 910 - DNA, 822 bp, Streptococcus agalactiae; identical to SEQ ID NO: 909

SEQ ID NO: 911 - DNA, 822 bp, Streptococcus agalactiae; identical to SEQ ID NO: 909

SEQ ID NO: 912 - DNA, 822 bp, Streptococcus agalactiae; identical to SEQ ID NO: 909

SEQ ID NO: 913 - DNA, 822 bp, Streptococcus agalactiae
gctaaagagagggtagatgttcttgcctataaacagggactttttgatacacgagagcaagcgaaacgtggtgttatggcaggactggtgattaacgttatcaatggagaacgttatgataaaccaggcgaaaaggttgcagacgatactgaattaaaactaaaaggtgaaaaactaaaatatgttagtagaggtggattgaaattagaaaaagctttacaagtttttgaaatttcagttgcagataagctaactatagatattggcgcctctacgggtggttttactgatgttatgctacaatcaggagcgcgtttagtttacgcagtagatgtaggaacaaatcaattagtttggaagttacgtcaggatcatcgtgttcgttctatggaacaatataattttaggtatgcccaaaaagaagatttcaaggagggactgcctgaatttgcatcgatagatgtctcatttatctctcttaatttgattttaccagctctaaaagaaattttagtggatggtggacaagtagtggcattaattaaaccacaatttgaagcaggtcgtgagcaaattggtaaaaatggtattgtcaaagacaagttggttcatgaaaaggttttgacaacagtgaccaatttcacgaaagattatggatatacggttaaacatcttgatttttcgcccgttcaaggtggacatggaaatattgagtttttaatgcatttgcaaaagtgtcaagatccacaaaatcttgtgcttgaccaaatacaagatgttatagaaaaagcacataaggaatttaagaaaaatgaagaagag

SEQ ID NO: 914 - DNA, 822 bp, Streptococcus agalactiae; identical to SEQ ID NO: 913

SEQ ID NO: 915 - DNA, 822 bp, Streptococcus agalactiae; identical to SEQ ID NO: 913

SEQ ID NO: 916 - DNA, 822 bp, Streptococcus agalactiae; identical to SEQ ID NO: 909

SEQ ID NO: 917 - DNA, 822 bp, Streptococcus agalactiae
gctaaagagagggtagatgttcttgcctataaacagggactttttgatacacgagagcaagcgaaacgtggtgttatggcaggactggtgattaacgttatcaatggagaacgttatgataaaccaggcgaaaaggttgcagacgatactgaattaaaactaaaaggtgaaaaactaaaatatgttagtagaggtggattgaaattagaaaaagctttacaagtttttgaaatttcagttgcagataagctaactatagatattggcgcctctacgggtggttttactgatgttatgctacaatcaggagcgcgtttagtttacgcagtagatgtaggaacaaatcaattagtttggaagttacgtcaggatcatcgtgttcgttctatggaacaatataattttaggtatgcccaaaaagaagatttcaaggagggactgcctgaatttgcatcgatagatgtctcatttatctctcttaatttgattttgccagctctaaaagaaattttagtggatggtggacaagtagtggcattaattaaaccacaatttgaagcaggtcgtgagcaaattggtaaaaatggtattgtcaaagacaagttggttcatgaaaaggttttgacaacagtgaccaatttcacgaaagattatggatatacggttaaacatcttgatttttcgcccattcaaggtggacatggaaatattgagtttttaatgcatttgcaaaagtgtcaagatccacaaaatcttgtgcttgaccaaatacaagatgttatagaaaaagcacataaggaatttaagaaaaatgaagaagag

SEQ ID NO: 918 - DNA, 822 bp, Streptococcus agalactiae; identical to SEQ ID NO: 909

SEQ ID NO: 919 - protein, 275 aa, Streptococcus agalactiae
MAKERVDVLAYKQGLFDTREQAKRGVMAGMVINVINGERYDKPGEKVADDTELKLKGEKLKYVSRGGLKLEKALQVFEISVADKLTIDIGASTGGFTDVMLQSGARLVYAVDVGTNQLVWKLRQDHRVRSMEQYNFRYAQKEDFKEGLPEFASIDVSFISLNLILPALKEILVDGGQVVALIKPQFEAGREQIGKNGIVKDKLVHEKVLTTVTNFTKDYGYTVKHLDFSPIQGGHGNIEFLMHLQKCQDPQNLVLDQIQDVIEKAHKEFKKNEEE

SEQ ID NO: 920 - protein, 274 aa, Streptococcus agalactiae
AKERVDVLAYKQGLFDTREQAKRGVMAGMVINVINGERYDKPGEKVADDTELKLKGEKLKYVSRGGLKLEKALQVFEISVADKLTIDIGASTGGFTDVMLQSGARLVYAVDVGTNQLVWKLRQDHRVRSMEQYNFRYAQKEDFKEGLPEFASIDVSFISLNLILPALKEILVDGGQVVALIKPQFEAGREQIGKNGIVKDKLVHEKVLTTVTNFTKDYGYTVKHLDFSPIQGGHGNIEFLMHLQKCQDPQNLVLDQIQDVIEKAHKEFKKNEEE

SEQ ID NO: 921 - protein, 274 aa, Streptococcus agalactiae; identical to SEQ ID NO: 920

SEQ ID NO: 922 - protein, 274 aa, Streptococcus agalactiae; identical to SEQ ID NO: 920

SEQ ID NO: 923 - protein, 274 aa, Streptococcus agalactiae
AKERVDVLAYKQGLFDTREQAKRGVMAGLVINVINGERYDKPGEKVADDTELKLKGEKLKYVSRGGLKLEKALQVFEISVADKLTIDIGASTGGFTDVMLQSGARLVYAVDVGTNQLVWKLRQDHRVRSMEQYNFRYAQKEDFKEGLPEFASIDVSFISLNLILPALKEILVDGGQVVALIKPQFEAGREQIGKNGIVKDKLVHEKVLTTVTNFTKDYGYTVKHLDFSPVQGGHGNIEFLMHLQKCQDPQNLVLDQIQDVIEKAHKEFKKNEEE

SEQ ID NO: 924 - protein, 274 aa, Streptococcus agalactiae; identical to SEQ ID NO: 923

SEQ ID NO: 925 - protein, 274 aa, Streptococcus agalactiae; identical to SEQ ID NO: 923

SEQ ID NO: 926 - protein, 274 aa, Streptococcus agalactiae; identical to SEQ ID NO: 920

SEQ ID NO: 927 - protein, 274 aa, Streptococcus agalactiae
AKERVDVLAYKQGLFDTREQAKRGVMAGLVINVINGERYDKPGEKVADDTELKLKGEKLKYVSRGGLKLEKALQVFEISVADKLTIDIGASTGGFTDVMLQSGARLVYAVDVGTNQLVWKLRQDHRVRSMEQYNFRYAQKEDFKEGLPEFASIDVSFISLNLILPALKEILVDGGQVVALIKPQFEAGREQIGKNGIVKDKLVHEKVLTTVTNFTKDYGYTVKHLDFSPIQGGHGNIEFLMHLQKCQDPQNLVLDQIQDVIEKAHKEFKKNEEE

SEQ ID NO: 928 - protein, 274 aa, Streptococcus agalactiae; identical to SEQ ID NO: 920

SEQ ID NO: 929 - protein, 274 aa, Streptococcus agalactiae; identical to SEQ ID NO: 920

SEQ ID NO: 930 - DNA, 1376 bp, Streptococcus agalactiae
atgaataaaaaggtactattgacatcgacaatggcagcttcgctattatcagtcgcaagtgttcaagcacaagaaacagatacgacgtggacagcacgtactgtttcagaggtaaaggctgatttggtaaagcaagacaataaatcatcatatactgtgaaatatggtgatacactaagcgttatttcagaagcaatgtcaattgatatgaatgtcttagcaaaaataaataacattgcagatatcaatcttatttatcctgagacaacactgacagtaacttacgatcagaagagtcatactgccacttcaatgaaaatagaaacaccagcaacaaatgctgctggtcaaacaacagctactgtggatttgaaaaccaatcaagtttctgttgcagaccaaaaagtttctctcaatacaatttcggaaggtatgacaccagaagcagcaacaacgattgtttcgccaatgaagacatattcttctgcgccagctttgaaatcaaaagaagtattagcacaagagcaagctgttagtcaagcagcagctaatgaacaggtatcaccagctcctgtgaagtcgattacttcagaagttccagcagctaaagaggaagttaaaccaactcagacgtcagtcagtcagtcaacaacagtatcaccagcttctgttgccgctgaaacaccagctccagtagctaaagtagcaccggtaagaactgtagcagcccctagagtggcaagtgttaaagtagtcactcctaaagtagaaactggtgcatcaccagagcatgtatcagctccagcagttcctgtgactacgacttcaccagctacagacagtaagttacaagcgactgaagttaagagcgttccggtagcacaaaaagctccaacagcaacaccggtagcacaaccagcttcaacaacaaatgcagtagctgcacatcctgaaaatgcagggctccaacctcatgttgcagcttataaagaaaaagtagcgtcaacttatggagttaatgaattcagtacataccgtgcgggagatccaggtgatcatggtaaaggtttagcagttgactttattgtaggtactaatcaagcacttggtaataaagttgcacagtactctacacaaaatatggcagcaaataacatttcatatgttatctggcaacaaaagttttactcaaatacaaacagtatttatggacctgctaatacttggaatgcaatgccagatcgtggtggcgttactgccaaccactatgaccacgttcacgtatcatttaacaaataatataaaaaaggaagctatttggcttcttttttatatgccttgaatagactttcaaggttcttatataatttttatta

SEQ ID NO: 931 - DNA, 1116 bp, Streptococcus agalactiae
tgagacaacactgacagtaacttacgatcagaagagtcatactgccacttcaatgaaaatagaaacaccagcaacaaatgctgctggtcaaacaccagctactgtggatttgaaaaccaatcaagtttctgttgcagaccaaaaagtttctctcaatacaatttcggaaggtatgacaccagaagcagcaacaacgattgtttcgccaatgaagacatattcttctgcgccagctttgaaatcaaaagaagtattagcacaagagcaagctgttagtcaagcagcagctaatgaacaggtatcaacagctcctgtgaagtcgattacttcagaagttccagcagctaaagaggaagttaaaccaactcagacgtcagtcagtcagtcaacaacagtatcaccagcttctgttgccgctgaaacaccagctccagtagctaaagtagcaccggtaagaactgtagcagcccctagagtggcaagtgttaaagtagtcactcctaaagtagaaactggtgcatcaccagagcatgtatcagctccagcagttcctgtgactacgacttcaacagctacagacagtaagttacaagcgactgaagttaagagcgttccggtagcacaaaaagctccaacagcaacaccggtagcacaaccagcttcaacaacaaatgcagtagctgcacatcctgaaaatgcagggctccaacctcatgttgcagcttataaagaaaaagtagcgtcaacttatggagttaatgaattcagtacataccgtgcaggtgatccaggtgatcatggtaaaggtttagcagtcgactttattgtaggtaaaaaccaagcacttggtaatgaagttgcacagtactctacacaaaatatggcagcaaataacatttcatatgttatctggcaacaaaagttttactcaaatacaaatagtatttatggacctgctaatacttggaatgcaatgccagatcgtggtggcgttactgccaaccattatgaccatgttcacgtatcatttaacaaataatataaaaaaggaagctatttggcttcttttttatatgccttgaatagactttcaaggttcttatataatttttatta

SEQ ID NO: 932 - DNA, 1258 bp, Streptococcus agalactiae
ctgatttggtaaagcaagacaataaatcatcatatactgtgaaatatggtgatacactaagcgttatttcagaagcaatgtcaattgatatgaatgtcttagcaaaaattaataacattgcagatatcaatcttatttatcctgagacaacactgacagtaacttacgatcagaagagtcatactgctacttcaatgaaaatagaaacaccagcaacaaatgctgctggtcaaacaacagctactgtcgatttgaaaaccaatcaagtttctgttgcagaccaaaaagtttctctcaatacaatttcggaaggtatgacaccagaagcagcaacaacgattgtttcgccaatgaagacatattcttctgcgccagctttgaaatcaaaagaagtattagcacaagggcaagctgttagtcaagcagcagctaatgaacaggtatcaccagctcctgtgaagtcgattacttcagaagttccagcagctaaagaggaagttaaaccaactcagacgtcagtcagtcagtcaacaacagtatcaccagcttctgttgccgctgaaacaccagctccagtagctaaagtagcaccggtaagaactgtagcagcccctagagtggcaagtgttaaagtagtcactcctaaagtagaaactggtgcatcaccagagcatgtatcagctccagcagttcctgtgactacgacttcaacagctacagacagtaagttacaagcgactgaagttaagagcgttccggtagcacaaaaagctccaacagcaacaccggtagcacaaccagcttcaacaacaaatgcagtagctgcacatcctgaaaatgcaaggctccaacctcatgttgcagcttataaagaaaaagtagcgtcaacttatggagttaatgaattcagtacataccgtgcgggagatccaggtgatcatggtaaaggtttagcagttgactttattgtaggtaaaaaccaagcacttggtaatgaagttgcacagtactctacacaaaatatggcagcaaataacatttcatatgttatctggcaacaaaagttttactcaaatacaaatagtatttatggacctgctaatacttggaatgcaatgccagatcgtggtggcgttactgccaaccactatgaccacgttcacgtatcatttaacaaataatataaaaaaggaagctatttggcttcttttttatatgccttgcatagactttcaaggttcttatataatttttatta

SEQ ID NO: 933 - DNA, 1258 bp, Streptococcus agalactiae; identical to SEQ ID NO: 932

SEQ ID NO: 934 - DNA, 1258 bp, Streptococcus agalactiae
ctgatttggtaaagcaagacaataaatcatcatatactgtgaaatatggtgatacactaagcgttatttcagaagcaatgtcaattgatatgaatgtcttagcaaaaataaataacattgcagatatcaatcttatttatcctgagacaacactgacagtaacttacgatcagaagagtcatactgccacttcaatgaaaatagaaacaccagcaacaaatgctgctggtcaaacaacagctactgtggatttgaaaaccaatcaagtttctgttgcagaccaaaaagtttctctcaatacaatttcggaaggtatgacaccagaagcagcaacaacgattgtttcgccaatgaagacatattcttctgcgccagctttgaaatcaaaagaagtattagcacaagagcaagctgttagtcaagcagcagctaatgaacaggtatcaccagctcctgtgaagtcgattacttcagaagttccagcagctaaagaggaagttaaaccaactcagacgtcagtcagtcagtcaacaacagtatcaccagcttctgttgccgctgaaacaccagctccagtagctaaagtagcaccggtaagaactgtagcagcccctagagtggcaagtgttaaagtagtcactcctaaagtagaaactggtgcatcaccagagcatgtatcagctccagcagttcctgtgactacgacttcaccagctacagacagtaagttacaagcgactgaagttaagagcgttccggtagcacaaaaagctccaacagcaacaccggtagcacaaccagcttcaacaacaaatgcagtagctgcacatcctgaaaatgcagggctccaacctcatgttgcagcttataaagaaaaagtagcgtcaacttatggagttaatgaattcagtacataccgtgcgggagatccaggtgatcatggtaaaggtttagcagttgactttattgtaggtactaatcaagcacttggtaataaagttgcacagtactctacacaaaatatggcagcaaataacatttcatatgttatctggcaacaaaagttttactcaaatacaaacagtatttatggacctgctaatacttggaatgcaatgccagatcgtggtggcgttactgccaaccactatgaccacgttcacgtatcatttaacaaataatataaaaaaggaagctatttggcttcttttttatatgccttgaatagactttcaaggttcttatataatttttatta

SEQ ID NO: 935 - DNA, 1258 bp, Streptococcus agalactiae
ctgatttggtaaagcaagacaataaatcatcatatactgtgaaatatggtgatacactaagcgttatttcagaagcaatgtcaattgatatgaatgtcttagcaaaaattaataacattgcagatatcaatcttatttatcctgagacaacactgacagtaacttacgatcagaagagtcatactgccacttcaatgaaaatagaaacaccagcaacaaatgctgctggtcaaacaacagctactgtcgatttgaaaaccaatcaagtttttgttgcagaccaaaaagtttctctcaatacaatttcggaaggtatgacaccagaagcagcaacaacgattgtttcgccaatgaagacatattcttctgcgccagctttgaaatcaaaagaagtattagcacaagagcaagctgttagtcaagtagcagctaatgaacaggtatcaccagctcctgtgaagtcgattacttcagaagttccagcagctaaagaggaagttaaaccaactcagacgtcagtcagtcagttaacaacagtatcaccagcttctgttgccgctgaaacaccagctccagtagctaaagtagcaccggtaagaactgtagcagcccctagagtggcaagtgctaaagtagtcactcctaaagtagaaactggtgcatcaccagagcatgtatcagctccagcagttcctgtgactacgacttcaccagctacagacagtaagttacaagcgactgaagttaagagcgttccggtagcacaaaaagctccaacagcaacaccggtagcacaaccagcttcaacaacaaatgcagtagctgcacatcctgaaaatgcagggctccaacctcatgttgcagcttataaagaaaaagtagcgtcaacttatggagttaatgaattcagtacataccgtgcgggagatccaggtgatcatggtaaaggtttagcagttgactttattgtaggtaaaaaccaagcacttggtaatgaagttgcacagtactctacacaaaatatggcagcaaataacatttcatatgttatctggcaacaaaagttttattcaaatacaaatagtatttatggacctgctaatacttggaatgcaatgccagatcgtggtggcgttactgccaaccactatgaccacgttcacgtatcatttaacaaataatataaaaaaggaagctatttggcttcttttttatatgccttgaatagactttcaaggttcttatataatttttatta

SEQ ID NO: 936 - DNA, 1258 bp, Streptococcus agalactiae
  misc_feature 57: n = A,T,C or G
ctgatttggtaaagcaagacaataaatcatcatatactgtgaaatatggtgatacantaagcgttatttcagaagcaatgtcaattgatatgaatgtcttagcaaaaattaataacattgcagatatcaatcttatttatcctgagacaacactgacagtaacttacgatcagaagagtcatactgccacttcaatgaaaatagaaacaccagcaacaaatgctgctggtcaaacaacagctactgtcgatttgaaaaccaatcaagtttttgttgcagaccaaaaagtttctctcaatacaatttcggaaggtatgacaccagaagcagcaacaacgattgtttcgccaatgaagacatattcttctgcgccagctttgaaatcaaaagaagtattagcacaagagcaagctgttagtcaagtagcagctaatgaacaggtatcaccagctcctgtgaagtcgattacttcagaagttccagcagctaaagaggaagttaaaccaactcagacgtcagtcagtcagttaacaacagtatcaccagcttctgttgccgctgaaacaccagctccagtagctaaagtagcaccggtaagaactgtagcagcccctagagtggcaagtgctaaagtagtcactcctaaagtagaaactggtgcatcaccagagcatgtatcagctccagcagttcctgtgactacgacttcaccagctacagacagtaagttacaagcgactgaagttaagagcgttccggtagcacaaaaagctccaacagcaacaccggtagcacaaccagcttcaacaacaaatgcagtagctgcacatcctgaaaatgcagggctccaacctcatgttgcagcttataaagaaaaagtagcgtcaacttatggagttaatgaattcagtacataccgtgcgggagatccaggtgatcatggtaaaggtttagcagttgactttattgtaggtaaaaaccaagcacttggtaatgaagttgcacagtactctacacaaaatatggcagcaaataacatttcatatgttatctggcaacaaaagttttattcaaatacaaatagtatttatggacctgctaatacttggaatgcaatgccagatcgtggtggcgttactgccaaccactatgaccacgttcacgtatcatttaacaaataatataaaaaaggaagctatttggcttcttttttatatgccttgaatagactttcaaggttcttatataatttttatta

SEQ ID NO: 937 - DNA, 1258 bp, Streptococcus agalactiae; identical to SEQ ID NO: 935

SEQ ID NO: 938 - DNA, 1258 bp, Streptococcus agalactiae
ctgatttggtaaagcaagacaataaatcatcatatactgtgaaatatggtgatacactaagcgttatttcagaagcaatgtcaattgatatgaatgtcttagcaaaaattaataacattgcagatatcaatcttatttatcctgagacaacactgacagtaacttacgatcagaagagtcatactgccacttcaatgaaaatagaaacaccagcaacaaatgctgctggtcaaacaccagctactgtggatttgaaaaccaatcaagtttctgttgcagaccaaaaagtttctctcaatacaatttcggaaggtatgacaccagaagcagcaacaacgattgtttcgccaatgaagacatattcttctgcgccagctttgaaatcaaaagaagtattagcacaagagcaagctgttagtcaagcagcagctaatgaacaggtatcaacagctcctgtgaagtcgattacttcagaagttccagcagctaaagaggaagttaaaccaactcagacgtcagtcagtcagtcaacaacagtatcaccagcttctgttgccgctgaaacaccagctccagtagctaaagtagcaccggtaagaactgtagcagcccctagagtggcaagtgttaaagtagtcactcctaaagtagaaactggtgcatcaccagagcatgtatcagctccagcagttcctgtgactacgacttcaacagctacagacagtaagttacaagcgactgaagttaagagcgttccggtagcacaaaaagctccaacagcaacaccggtagcacaaccagcttcaacaacaaatgcagtagctgcacatcctgaaaatgcagggctccaacctcatgttgcagcttataaagaaaaagtagcgtcaacttatggagttaatgaattcagtacataccgtgcaggtgatccaggtgatcatggtaaaggtttagcagtcgactttattgtaggtaaaaaccaagcacttggtaatgaagttgcacagtactctacacaaaatatggcagcaaataacatttcatatgttatctggcaacaaaagttttactcaaatacaaatagtatttatggacctgctaatacttggaatgcaatgccagatcgtggtggcgttactgccaaccattatgaccatgttcacgtatcatttaacaaataatataaaaaaggaagctatttggcttcttttttatatgccttgaatagactttcaaggttcttatataatttttatta

SEQ ID NO: 939 - DNA, 1264 bp, Streptococcus agalactiae
ctgatttggtaaagcaagacaataaatcatcatatactgtgaaatatggtgatacactaagcgttatttcagaagcaatgtcaattgatatgaatgtcttagcaaaaattaataacattgcagatatcaatcttatttatcctgagacaacactgacagtaacttacgatcagaagagtcatactgccacttcaatgaaaatagaaacaccagcaacaaatgctgctggtcaaacaacagctactgtggatttgaaaaccaatcaagtttctgttgcagaccaaaaagtttctctcaatacaatttcggaaggtatgacaccagaagcagcaacaacgattgtttcgccaatgaagacatattcttctgcgccagctttgaaatcaaaagaagtattagcacaagagcaagctgttagtcaagcagcagctaatgaacaggtatcaccagctcctgtgaagtcgattacttcagaagttccagcagctaaagaggaagttagaccaactcagacgtcagtcagtcagtcaacaacagtatcaccagcttctgttgccgctgaaacaccagctccagtagctaaagtagcaccggtaagaactgtagcagccccagcccctagagtggcaagtgctaaagtagtcactcctaaagtagaaactggtgcatcaccagagcatgtaccagctccagcagttcctgtgactacgacttcaacagctacagacaataagttacaagcgactgaagttaagagcgttccggtggcacaaaaagctccaacagcaacaccggtagcacaaccagcttcaacaacaaatgcagtagctgcacatcctgaaaatgcaggactccaacctcatgttgcagcttataaagaaaaagtagcgtcaacttatggagttaatgaattcagtacataccgtgcgggagatccaggtgatcatggtaaaggtttagcagttgactttattgtaggtaaaaaccaagcacttggtaatgaagttgcacagtactctacacaaaatatggcagcaaataacatttcatatgttatctggcaacaaaagttttactcaaatacaaatagtatttatggacctgctaatacttggaatgcaatgccagatcgtggtggcgttactgccaaccactatgaccacgttcacgtatcatttaacaaataatataaaaaaggaagctatttggcttcttttttatatgccttgaatagactttcaaggttcttatataatttttatta

SEQ ID NO: 940 - DNA, 1258 bp, Streptococcus agalactiae; identical to SEQ ID NO: 934

SEQ ID NO: 941 - protein, 458 aa, Streptococcus agalactiae
  VARIANT 433: Xaa = Any Amino Acid
MNKKVLLTSTMAASLLSVASVQAQETDTTWTARTVSEVKADLVKQDNKSSYTVKYGDTLSVISEAMSIDMNVLAKINNIADINLIYPETTLTVTYDQKSHTATSMKIETPATNAAGQTTATVDLKTNQVSVADQKVSLNTISEGMTPEAATTIVSPMKTYSSAPALKSKEVLAQEQAVSQAAANEQVSPAPVKSITSEVPAAKEEVKPTQTSVSQSTTVSPASVAAETPAPVAKVAPVRTVAAPRVASVKVVTPKVETGASPEHVSAPAVPVTTTSPATDSKLQATEVKSVPVAQKAPTATPVAQPASTTNAVAAHPENAGLQPHVAAYKEKVASTYGVNEFSTYRAGDPGDHGKGLAVDFIVGTNQALGNKVAQYSTQNMAANNISYVIWQQKFYSNTNSIYGPANTWNAMPDRGGVTANHYDHVHVSFNKXYKKGSYLASFLYALNRLSRFLYNFY

SEQ ID NO: 942 - protein, 371 aa, Streptococcus agalactiae
  VARIANT 346: Xaa = Any Amino Acid
ETTLTVTYDQKSHTATSMKIETPATNAAGQTPATVDLKTNQVSVADQKVSLNTISEGMTPEAATTIVSPMKTYSSAPALKSKEVLAQEQAVSQAAANEQVSTAPVKSITSEVPAAKEEVKPTQTSVSQSTTVSPASVAAETPAPVAKVAPVRTVAAPRVASVKVVTPKVETGASPEHVSAPAVPVTTTSTATDSKLQATEVKSVPVAQKAPTATPVAQPASTTNAVAAHPENAGLQPHVAAYKEKVASTYGVNEFSTYRAGDPGDHGKGLAVDFIVGKNQALGNEVAQYSTQNMAANNISYVIWQQKFYSNTNSIYGPANTWNAMPDRGGVTANHYDHVHVSFNKXYKKGSYLASFLYALNRLSRFLYNFY

SEQ ID NO: 943 - protein, 418 aa, Streptococcus agalactiae
  VARIANT 393: Xaa = Any Amino Acid
DLVKQDNKSSYTVKYGDTLSVISEAMSIDMNVLAKINNIADINLIYPETTLTVTYDQKSHTATSMKIETPATNAAGQTTATVDLKTNQVSVADQKVSLNTISEGMTPEAATTIVSPMKTYSSAPALKSKEVLAQGQAVSQAAANEQVSPAPVKSITSEVPAAKEEVKPTQTSVSQSTTVSPASVAAETPAPVAKVAPVRTVAAPRVASVKVVTPKVETGASPEHVSAPAVPVTTTSTATDSKLQATEVKSVPVAQKAPTATPVAQPASTTNAVAAHPENARLQPHVAAYKEKVASTYGVNEFSTYRAGDPGDHGKGLAVDFIVGKNQALGNEVAQYSTQNMAANNISYVIWQQKFYSNTNSIYGPANTWNAMPDRGGVTANHYDHVHVSFNKXYKKGSYLASFLYALHRLSRFLYNFY

SEQ ID NO: 944 - protein, 418 aa, Streptococcus agalactiae; identical to SEQ ID NO: 943
  VARIANT 393: Xaa = Any Amino Acid

SEQ ID NO: 945 - protein, 418 aa, Streptococcus agalactiae
  VARIANT 393: Xaa = Any Amino Acid
DLVKQDNKSSYTVKYGDTLSVISEAMSIDMNVLAKINNIADINLIYPETTLTVTYDQKSHTATSMKIETPATNAAGQTTATVDLKTNQVSVADQKVSLNTISEGMTPEAATTIVSPMKTYSSAPALKSKEVLAQEQAVSQAAANEQVSPAPVKSITSEVPAAKEEVKPTQTSVSQSTTVSPASVAAETPAPVAKVAPVRTVAAPRVASVKVVTPKVETGASPEHVSAPAVPVTTTSPATDSKLQATEVKSVPVAQKAPTATPVAQPASTTNAVAAHPENAGLQPHVAAYKEKVASTYGVNEFSTYRAGDPGDHGKGLAVDFIVGTNQALGNKVAQYSTQNMAANNISYVIWQQKFYSNTNSIYGPANTWNAMPDRGGVTANHYDHVHVSFNKXYKKGSYLASFLYALNRLSRFLYNFY

SEQ ID NO: 946 - protein, 418 aa, Streptococcus agalactiae
  VARIANT 19, 393: Xaa = Any Amino Acid
DLVKQDNKSSYTVKYGDTXSVISEAMSIDMNVLAKINNIADINLIYPETTLTVTYDQKSHTATSMKIETPATNAAGQTTATVDLKTNQVFVADQKVSLNTISEGMTPEAATTIVSPMKTYSSAPALKSKEVLAQEQAVSQVAANEQVSPAPVKSITSEVPAAKEEVKPTQTSVSQLTTVSPASVAAETPAPVAKVAPVRTVAAPRVASAKVVTPKVETGASPEHVSAPAVPVTTTSPATDSKLQATEVKSVPVAQKAPTASPVAQPASTTNAVAAHPENAGLQPHVAAYKEKVASTYGVNEFSTYRAGDPGDHGKGLAVDFIVGKNQALGNEVAQYSTQNMAANNISYVIWQQKFYSNTNSIYGPANTWNAMPDRGGVTANHYDHVHVSFNKXYKKGSYLASFLYALNRLSRFLYNFY

SEQ ID NO: 947 - protein, 418 aa, Streptococcus agalactiae
  VARIANT 393: Xaa = Any Amino Acid
DLVKQDNKSSYTVKYGDTLSVISEAMSIDMNVLAKINNIADINLIYPETTLTVTYDQKSHTATSMKIETPATNAAGQTTATVDLKTNQVFVADQKVSLNTISEGMTPEAATTIVSPMKTYSSAPALKSKEVLAQEQAVSQVAANEQVSPAPVKSITSEVPAAKEEVKPTQTSVSQLTTVSPASVAAETPAPVAKVAPVRTVAAPRVASAKVVTPKVETGASPEHVSAPAVPVTTTSPATDSKLQATEVKSVPVAQKAPTATPVAQPASTTNAVAAHPENAGLQPHVAAYKEKVASTYGVNEFSTYRAGDPGDHGKGLAVDFIVGKNQALGNEVAQYSTQNMAANNISYVIWQQKFYSNTNSIYGPANTWNAMPDRGGVTANHYDHVHVSFNKXYKKGSYLASFLYALNRLSRFLYNFY

SEQ ID NO: 948 - protein, 418 aa, Streptococcus agalactiae; identical to SEQ ID NO: 947
  VARIANT 393: Xaa = Any Amino Acid

SEQ ID NO: 949 - protein, 418 aa, Streptococcus agalactiae
  VARIANT 393: Xaa = Any Amino Acid
DLVKQDNKSSYTVKYGDTLSVISEAMSIDMNVLAKINNIADINLIYPETTLTVTYDQKSHTATSMKIETPATNAAGQTPATVDLKTNQVSVADQKVSLNTISEGMTPEAATTIVSPMKTYSSAPALKSKEVLAQEQAVSQAAANEQVSTAPVKSITSEVPAAKEEVKPTQTSVSQSTTVSPASVAAETPAPVAKVAPVRTVAAPRVASVKVVTPKVETGASPEHVSAPAVPVTTTSTATDSKLQATEVKSVPVAQKAPTATPVAQPASTTNAVAAHPENAGLQPHVAAYKEKVASTYGVNEFSTYRAGDPGDHGKGLAVDFIVGKNQALGNEVAQYSTQNMAANNISYVIWQQKFYSNTNSIYGPANTWNAMPDRGGVTANHYDHVHVSFNKXYKKGSYLASFLYALNRLSRFLYNFY

SEQ ID NO: 950 - protein, 420 aa, Streptococcus agalactiae
  VARIANT 395: Xaa = Any Amino Acid
DLVKQDNKSSYTVKYGDTLSVISEAMSIDMNVLAKINNIADINLIYPETTLTVTYDQKSHTATSMKIETPATNAAGQTTATVDLKTNQVSVADQKVSLNTISEGMTPEAATTIVSPMKTYSSAPALKSKEVLAQEQAVSQAAANEQVSPAPVKSITSEVPAAKEEVRPTQTSVSQSTTVSPASVAAETPAPVAKVAPVRTVAAPAPRVASAKVVTPKVETGASPEHVPAPAVPVTTTSTATDNKLQATEVKSVPVAQKAPTATPVAQPASTTNAVAAHPENAGLQPHVAAYKEKVASTYGVNEFSTYRAGDPGDHGKGLAVDFIVGKNQALGNEVAQYSTQNMAANNISYVIWQQKFYSNTNSIYGPANTWNAMPDRGGVTANHYDHVHVSFNKXYKKGSYLASFLYALNRLSRFLYNFY

SEQ ID NO: 951 - protein, 418 aa, Streptococcus agalactiae; identical to SEQ ID NO: 945
  VARIANT 393: Xaa = Any Amino Acid

SEQ ID NO: 952 - DNA, 6834 bp, Streptococcus agalactiae
atgggagggaaaatgaatcaagaagtcttactacaaatgatgagagccactattcctcgtgatagagccttgcttgaggcatttttatattaccaagcagagcattttgatgaggagtgggatagtcttattcatcagtttatgaccaataggcaagaaataaataagtctgttcaagtacttcactttgagacagatgtttcagcttttgtccaggctagtccttatgatactgctcatgatctattgacctatacacaagttttcggccaaagtggtcttcaaaaactagataaactatcgccgtctgaaaaaaacttggtgatagaagtggccttgttcaatctggccactcgttttcaattattggattccaatggacactaccaaaccatatcgccggattcactcttacaaaagagtaggggagctaatttggtcaatgtgtatcgtgtggctaataatttagcggatcgtattagtcgagatattgaacagtttctcttaacttacgagcctgagcttgaaactagagctgatgaaactgttctagaaaatgaagaaactgttgatgagcacaaaacaagtgttcatcaagcaatatcttttcgagaagagggctctctggttattgctagtttggatgtagatttgtctcaactagatgttcaaataggaaaaaccagtcatctgccagcttatgaagagttatccttacgacgtaaatttgagattctaacatattttgaccaaattcgaaatgaacgttccaaagtcccaagttttagacgaggtgattttgacacagagatggaaatgacaccagtctttgatggcgaggaattacttacttatctcgaagctgatggcagtccctatgagctgaaacgaacgctgactacagtcgaagaaaaggaattagaaaaaattggacaagccattaggatagaaaatcaagaaaaattgactcagctagggattgatttatctcagtttgacccagaccgagtcggtattttattggatgcagcaggtcgttttcgtttaaaaaatgcagaccttgctttactaggtggttatcccaaagcctcggtaactcaactagcccttgcgacagaactactccaaatgggactaagtcatgaaaaggttgaatttttctttggtagccagctttccattgaagagctgcgacaagttgcctacgcctttttataccaagaactcagcagagaagatgcggagcaatttgaaaaagataaaggtaatcagccagatttaactctcagagattggaaaagcaagctagagaaagctgagggaaaagaagtagttgatgaagaattcgcggaaaatccactggttcagagagtattggacacttatcctctggggtcattggtttcctataagggacaggactttgaggtcatgtcggtcagcgatgctcgattgaacggtttgattcggattgagttagtcaatgacttttcggatatcattgaacaaaatccagttctttatgtgaggacctgggaagaagtcagtcaggcacttcatcagccaaaggcagaaccacaaacagagttagaagaagcggaccaagaattaaacctattctcatttctggaagaggagccagttcagagtattggactattggaaccagatgattcagaaaatggtcataacgatactgatcttgaagaaacagataatcaaattcctgaagaggaagtcgtcgaaacaattccagagattccagtaacggacttttattttccagaagatttgacggacttttatcctaagactgctagagataaggttgagacaaacattgtggccattcgtttggtaaaaaatctagaagtagagcaccgcaatgcttcaccaagtgaacaagaactccttgccaagtatgtaggctggggtggactagccaatgaattttttgatgactataatccaaaattttctaaggaacgagaagaactgaagagcctagtcacagataaagagtattcggatatgaaacagtcctccctgacagcctattacacagacccatccctgatccgtcagatgtgggataagttggaaagagatggctttacaggtggcaaaatcctagatccttccatgggaacagggaatttctttgcggctatgccaaaacacttaagagaaaagagtgagttgtatggcgtagagttagatactattacaggagctattgccaaacaccttcatcccaatagtcatattgaaattaagggatttgagacggtggcttttaacgacaatagttttgatttggtgatttcaaatgtgccctttgccaatatacgaattgcggataataggtacgataggccttacatgattcatgactactttgtcaaaaagtcacttgatttgcttcatgatggtggacaagtagcgattatctcttccacaggaactatggataagcgaacagaaaacatcttacaagatattcgtgagacaactgaatttcttggtggggttcgactgcctgactctgcctttaaggccattgcaggaacgagtgtcacaacggatatgttattcttccagaaacacttagacaagggatatgtggcagacgatttagccttttcaggttccattcgctatgacaaggatagtcgcatttggctcaatccttattttgatggagaatacaatagccaggtgctaggaacctacgaggtcaggaattttaacggaggaacactttctgttaaggggactagtgatgacttgattgcaagtgttgaaacagctctaaatcacgttaaggccccaagagagattgatagaaatgaggtcatcattaacccagatgtgttgaccaaacaagtcaatgatacctccattccagctgaaatgagggaaaatctaggtcagtacagttttggttatcaggggtctacagtttactatcgagataacaaaggcattcgagtcggaaccaagacggaagaaatcagttactatgtcgatgaagagggcaacttcaaagcatgggacaccaaacattctcaaaagcagattgatcgctttaatgccttagaagtgactgataacactgctctggatgtctatgtgaccgatgatgcagccaaacgtggtcagtttaaggggtattataaaaagacagttttctatgaagctccattgtcttataaagaagtggcacgtatcaaaggaatggtcgatattcgcaatgcctaccaagaagttattgccattcaacgctattatgactatgataaggagacctttaaccacttgttaggcaaactcaatcgtacctatgatagctttgtcaaacactatgggtatttgaatagtgctgtgaaccgcaatctttttgatagtgatgataagtattcgcttcttgctagtttggaagatgaaagtctggatccaagtggaaagtctgttatctatactaaatcccttgcctttgagaaggctctagtgcgtcctgaaaaagaggttaaaaaggtgcatactgcccttgatgccttaaattcgagcttggctgacggacgaggtgttgatttcgcttatatgatgtctatctatcaggttgaatcgcagatgaccttgattgaggagttaggcgacctcattatgcctgatcctgagaagtatttgaatggagaattgacctatgtttctcgccaagactttctttcaggggatgtcgtcactaagttagaagtggtagatctattcgtcaaacaagacaatcaggactttaactggtcacattatgcgggacttctagaagctatcaaaccagcccgtattactttggcagacattgattatcgaatcggttcacgctggattcctctggctgtttatggaaaatttgcccaagaaacctttatggggaaagcctatgaactgtcagaccaagaagtagcgacagtcctagaagtcagtcccattgacggggttatcacttaccaatctaagtttgcctacacctattccaacgcaacggataggagtttaggtgtccctgcttcacgctatgatagtggtcgaaaaatctttgaaaatctcctgaattccaatcaaccaaccatcacaaaacaagttgtcgaaggggataagaaaaagaatgtgacggatgtagagaaaacaacggtcctgcgtgccaaggaaacacacctacaagaactctttcaaggttttgtagcaaagtatccagaagtccaacaaatgattgaagacacctataataggctctacaatcgtacggtatcaaagtcctatgatggtagtcatttaaccattgatggacttgctcagaatatctccttacgtcctcaccaaaagaatgccattcaacgaattgtcgaggaaaaacgtgctctactagctcatgaagttggttcaggtaaaacacttaccatgcttggggcaggattcaaactgaaagaactcggaatggtacataaaccactttatgtggtgccgtctagtctgactgctcagtttggtcaagaaatcatgaaatttttccctaccaagaaagtctatgtgactactaagaaagactttgccaaagccaaacgcaagcagtttgtgtcccgtattattacaggggactatgatgccattgtcattggggattcacaatttgagaagataccgatgagtcgtgaaaaacaggtcacctatatcaatgacaaacttgagcaactccgagaaatcaagctaggaagtgacagtgattacacggtgaaagaagcggaacgttcgattaagggattagaacaccagttggaagaactccaaaaactagagcgagatacctttattgagtttgaaaaccttggaattgattttctttttgtggatgaggctcatcacttcaagaatatccgtccaatcactggacttgggaatgtagctggaatcaccaacacaacttctaaaaagaacgtggatatggagatgaaggtgagacaagtacaggcagagcatggagatagaaatgtcgtttttgcgacaggaacaccagtttctaactctattagtgaacttttcaccatgatggattacattcaacctgatgtcttggaacgatacctggtatcaaattttgactcctgggttggggcttttgggaatatcgaaaactccatggaactagccccgacaggagataagtaccaacccaagaaacggttcaagaaatttgtcaaccttcctgaactcatgcgaatctacaaggaaactgccgatattcagacctcagacatgcttgatttaccagtaccggaagctaagattattgcggtggaaagcgagttaacgcaagctcagaaatactatttggaagagctggtaaagcgttcagacgctatcaagtcaggtagtgttgatccaagtagagataacatgcttaaaatcacaggagaagccagaaaactagctattgatatgcggttgattgaccctacttactccttatcggataatcagaaaatccttcaagtagtcgataatgtcgagcggatttaccgtgatggagctggagacaaagccactcagatgattttctcagatattggaacccctaaaagtaaggaagaagggtttgatgtctacaatgaacttaaggacttgtttgtcgatcgagggataccaaaagaagaaattgcctttgtccatgatgccaatactgatgagaagaaaaactctctgtcacgcaaggtcaatagtggagaagtacggattctcatggcttctacggaaaaagggggaacaggattaaacgtccaatctcgcatgaaagctgtccactatttagacgttccctggaggccctcagacattgtccagcgaaatggacgactaattcgacaaggaaacatgcaccaggaggtagatatttatcactatattactaaagggagctttgacaattacctctggcagacgcaggagaataagctaaagtatatcacccagataatgacctcaaaagatcctgtgagatcagctgaagacattgatgaacaaaccatgaccgcctcagactttaaggcattggcaactgggaacccttatctcaaactcaaaatggagttggaaaatgaactgacagttttagagaatcaaaaacgagcctttaatcgctccaaagacgagtatcgccataccatttcctatagcgagaagcacctccctattatggaaaaacggttgagtcaatatgataaagatattgcccaatctttggcaaccaagtcgcaagattttgtcatgcgatttgacaatcaagcaatggataatcgtgctgaagctggggactatctgcgaaaactcattacctataaccgctcagagaccaaggaagtcaggacacttgccagctttagaggatttgatttaaaaatgactacacgaggtgctagtgagcccttaccagaaaccatttctttaatgattgtaggtgataaccagtatactgtcgcccttgatttgaaatcagacgtgggaaccattcaacggattagtaatgccattgaccatattatagatgaccaagaaaagacgcaagagctggtaaaggatttaaaagataagctacgagtagccaaagtagaagttgataaagtctttccaaaggaagaggactatcagcttgtaaaggctaagtatgatgttttagctcccttggttgaaaaagaagcagagattgaagagatagatgcagctttggccaagtttagtgaagatacaacaccccaaaagaagcaacaaatagcactcgagata

SEQ ID NO: 953 - DNA, 3033 bp, Streptococcus agalactiae
ggagggaaaatgaatcaagaagtcttactacaaatgatgagagccactattcctcgtgatagagccttgcttgaggcatttttatattaccaagcagagcattttgatgaggagtgggatagtcttattcatcagtttatgaccaataggcaagaaataaataagtctgttcaagtacttcactttgagacagatgtttcagcttttgtccaggctagtccttatgatactgctcatgatctattgacctatacacaagttttcggccaaagtggtcttcaaaaactagataaactatcgccgtctgaaaaaaacttggtgatagaagtggccttgttcaatctggccactcgttttcaattattggattccaatggacactaccaaaccatatcgccggattcactcttacaaaagagtaggggagctaatttggtcaatgtgtatcgtgtggctaataatttagcggatcgtattagtcgagatattgaacagtttctcttaacttacgagcctgagcttgaaactagagctgatgaaactgttctagaaaatgaagaaactgttgatgagcacaaaacaagtgttcatcaagcaatatcttttcgagaagagggctctctggttattgctagtttggatgtagatttgtctcaactagatgttcaaataggaaaaaccagtcatctgccagcttatgaagagttatccttacgacgtaaatttgagattctaacatattttgaccaaattcgaaatgaacgttccaaagtcccaagttttagacgaggtgattttgacacagagatggaaatgacaccagtctttgatggcgaggaattacttacttatctcgaagctgatggcagtccctatgagctgaaacgaacgctgactacagtcgaagaaaaggaattagaaaaaattggacaagccattaggatagaaaatcaagaaaaattgactcagctasgkattgrtttatctcagtttgacccagaccgagtcggtattttattgkatgcagcaggtcgtyytcgtttawawaatgcagaccttgcttcactaggtggttatcccaaagcctcggtaactcaactagcccttgcgacagaactactccaaatgggactaagtcatgaaaaggttgaatttttctttggtagccagctttccattgaagagctgcgacaagttgcctacgcctttttacaccaagaactcagcagagaagatgcggagcaatttgaaaaagataaaggtaatcagccagatttaactctcagagattggaaaagcaagctagagaaagctgagggaaaagaagtagttgatgaagaattcgcggaaaatccactggttcagagagtattggacacttatcctctggggtcattggtttcctataagggacaggactttgaggtcatgtcggtcagcgatgctcgattgaacggtttgattcggattgagttagtcaatgacttttcggatatcattgaacaaaatccagttctttatgtgaggacctgggaagaagtcagtcaggcacttcatcagccaaaggcagaaccacaaacagagttagaagaagcggaccaagaattaaacctattctcatttctggaagaggagctagttcagagtattggactattggaaccagatgattcagaaaatggtcataacgatactgatcttgaagaaacagataatcaaattcctgaagaggaagtcgtcgaaacaattccagagattccagtaacggacttttattttccagaagatttgacggacttttatcctaagactgctagagataaggttgagacaaacattgtggccattcgtttggtaaaaaatctagaagtagagcaccgcaatgcttcaccaagtgaacaagaactccttgccaagtatgtaggctggggtggactagccaatgaattttttgatgactataatccaaaattttctaaggaacgagaagaactgaagagcctagtcacagataaagagtattcggatatgaaacagtcctccctgacagcctattacacagacccatccctgatccgtcagatgtgggataagttggaaagagatggctttacaggtggcaaaatcctagatccttccatgggaacagggaatttctttgcggctatgccaaaacacttaagagaaaagagtgagttgtatggcgtagagttagatactattacaggagctattgccaaacaccttcatcccaatagtcatattgaaattaagggatttgagacggtggcttttaacgacaatagttttgatttggtgatttcaaatgtgccctttgccaatatacgaattgcggataataggtacgataggccttacatgattcatgactactttgtcaaaaagtcacttgatttgcttcatgatggtggacaagtagcgattatctcttccacaggaactatggataagcgaacagaaaacatcttacaagatattcgtgagacaactgaatttcttggtggggttcgactgcctgactctgcctttaaggccattgcaggaacgagtgtcacaacggatatgttattcttccagaaacacttagacaagggatatgtggcagacgatttagccttttcaggttccattcgctatgacaaggatagtcgcatttggctcaatccttattttgatggagaatacaatagccaggtgctaggaacctacgaggtcaggaattttaacggaggaacactttctgttaaggggactagtgatgacttgattgcaagtgttgaaacagctctaaatcacgttaaggccccaagagagattgatagaaatgaggtcatcattaacccagatgtgttgaccaaacaagtcaatgatacctccattccagctgaaatgagggaaaatctaggtcagtacagttttggttatcaggggtctacagtttactatcgagataacaaaggcattcgagtcggaaccaagacggaagaaatcagttactatgtcgatgaagag

SEQ ID NO: 954 - DNA, 3033 bp, Streptococcus agalactiae
  misc_feature 2: n = A,T,C or G
gnagggaaaatgaatcaagaagtcttactacaaatgatgagagccactattcctcgtgatagagccttgcttgaggcatttttatattaccaagcagagcattttgatgaggagtgggatagtcttattcatcagtttatgaccaataggcaagaaataaataagtctgttcaagtacttcactttgagacagatgtttcagcttttgtccaggctagtccttatgatactgctcatgatctattgacctatacacaagttttcggccaaagtggtcttcaaaaactagataaactatcgccgtctgaaaaaaacttggtgatagaagtggccttgttcaatctggccactcgttttcaattattggattccaatggacactaccaaaccatatcgccggattcactcttacaaaagagtaggggagctaatttggtcaatgtgtatcgtgtggctaataatttagcggatcgtattagtcgagatattgaacagtttctcttaacttacgagcctgagcttgaaactagagctgatgaaactgttctagaaaatgaagaaactgttgatgagcacaaaacaagtgttcatcaagcaatatcttttcgagaagagggctctctggttattgctagtttggatgtagatttgtctcaactagatgttcaaataggaaaaaccagtcatctgccagcttatgaagagttatccttacgacgtaaatttgagattctaacatattttgaccaaattcgaaatgaacgttccaaagtcccaagttttagacgaggtgattttgacacagagatggaaatgacaccagtctttgatggcgaggaattacttacttatctcgaagctgatggcagtccctatgagctgaaacgaacgctgactacagtcgaagaaaaggaattagaaaaaattggacaagccattaggatagaaaatcaagaaaaattgactcagctagggattgatttatctcagtttgacccagaccgagtcggtattttattggatgcagcaggtcgttttcgtttaaaaaatgcagaccttgctttactaggtggttatcccaaagcctcggtaactcaactagcccttgcgacagaactactccaaatgggactaagtcatgaaaaggttgaatttttctttggtagccagctttccattgaagagctgcgacaagttgcctacgcctttttacaccaagaactcagcagagaagatgcggagcaatttgaaaaagataaaggtaatcagccagatttaactctcagagattggaaaagcaagctagagaaagctgagggaaaagaagtagttgatgaagaattcgcggaaaatccactggttcagagagtattggacacttatcctctggggtcattggtttcctataagggacaggactttgaggtcatgtcggtcagcgatgctcgattgaacggtttgattcggattgagttagtcaatgacttttcggatatcattgaacaaaatccagttctttatgtgaggacctgggaagaagtcagtcaggcacttcatcagccaaaggcagaaccacaaacagagttagaagaagcggaccaagaattaaacctattctcatttctggaagaggagccagttcagagtattggactattggaaccagatgattcagaaaatggtcataacgatactgatcttgaagaaacagataatcaaattcctgaagaggaagtcgtcgaaacaattccagagattccagtaacggacttttattttccagaagatttgacggacttttatcctaagactgctagagataaggttgagacaaacattgtggccattcgtttggtaaaaaatctagaagtagagcaccgcaatgcttcaccaagtgaacaagaactccttgccaagtatgtaggctggggtggactagccaatgaattttttgatgactataatccaaaattttctaaggaacgagaagaactgaagagcctagtcacagataaagagtattcggatatgaaacagtcctccctgacagcctattacacagacccatccctgatccgtcagatgtgggataagttggaaagagatggctttacaggtggcaaaatcctagatccttccatgggaacagggaatttctttgcggctatgccaaaacacttaagagaaaagagtgagttgtatggcgtagagttagatactattacaggagctattgccaaacaccttcatcccaatagtcatattgaaattaagggatttgagacggtggcttttaacgacaatagttttgatttggtgatttcaaatgtgccctttgccaatatacgaattgcggataataggtacgataggccttacatgattcatgactactttgtcaaaaagtcacttgatttgcttcatgatggtggacaagtagcgattatctcttccacaggaactatggataagcgaacagaaaacatcttacaagatattcgtgagacaactgaatttcttggtggggttcgactgcctgactctgcctttaaggccattgcaggaacgagtgtcacaacggatatgttattcttccagaaacacttagacaagggatatgtggcagacgatttagccttttcaggttccattcgctatgacaaggatagtcgcatttggctcaatccttattttgatggagaatacaatagccaggtgctaggaacctacgaggtcaggaattttaacggaggaacactttctgttaaggggactagtgatgacttgattgcaagtgttgaaacagctctaaatcacgttaaggccccaagagagattgatagaaatgaggtcatcattaacccagatgtgttgaccaaacaagtcaatgatacctccattccagctgaaatgagggaaaatctaggtcagtacagttttggttatcaggggtctacagtttactatcgagataacaaaggcattcgagtcggaaccaagacggaagaaatcagttactatgtcgatgaagag

SEQ ID NO: 955 - protein, 1011 aa, Streptococcus agalactiae
  VARIANT 325, 327, 341, 346, 349: Xaa = Any Amino Acid
GGKMNQEVLLQMMRATIPRDRALLEAFLYYQAEHFDEEWDSLIHQFMTNRQEINKSVQVLHFETDVSAFVQASPYDTAHDLLTYTQVFGQSGLQKLDKLSPSEKNLVIEVALFNLATRFQLLDSNGHYQTISPDSLLQKSRGANLVNVYRVANNLADRISRDIEQFLLTYEPELETRADETVLENEETVDEHKTSVHQAISFREEGSLVIASLDVDLSQLDVQIGKTSHLPAYEELSLRRKFEILTYFDQIRNERSKVPSFRRGDFDTEMEMTPVFDGEELLTYLEADGSPYELKRTLTTVEEKELEKIGQAIRIENQEKLTQLXIXLSQFDPDRVGILLXAAGRXRLXNADLASLGGYPKASVTQLALATELLQMGLSHEKVEFFFGSQLSIEELRQVAYAFLHQELSREDAEQFEKDKGNQPDLTLRDWKSKLEKAEGKEVVDEEFAENPLVQRVLDTYPLGSLVSYKGQDFEVMSVSDARLNGLIRIELVNDFSDIIEQNPVLYVRTWEEVSQALHQPKAEPQTELEEADQELNLFSFLEEELVQSIGLLEPDDSENGHNDTDLEETDNQIPEEEVVETIPEIPVTDFYFPEDLTDFYPKTARDKVETNIVAIRLVKNLEVEHRNASPSEQELLAKYVGWGGLANEFFDDYNPKFSKEREELKSLVTDKEYSDMKQSSLTAYYTDPSLIRQMWDKLERDGFTGGKILDPSMGTGNFFAAMPKHLREKSELYGVELDTITGAIAKHLHPNSHIEIKGFETVAFNDNSFDLVISNVPFANIRIADNRYDRPYMIHDYFVKKSLDLLHDGGQVAIISSTGTMDKRTENILQDIRETTEFLGGVRLPDSAFKAIAGTSVTTDMLFFQKHLDKGYVADDLAFSGSIRYDKDSRIWLNPYFDGEYNSQVLGTYEVRNFNGGTLSVKGTSDDLIASVETALNHVKAPREIDRNEVIINPDVLTKQVNDTSIPAEMRENLGQYSFGYQGSTVYYRDNKGIRVGTKTEEISYYVDEE

SEQ ID NO: 956 - protein, 1011 aa, Streptococcus agalactiae
  VARIANT 1: Xaa = Any Amino Acid
XGKMNQEVLLQMMRATIPRDRALLEAFLYYQAEHFDEEWDSLIHQFMTNRQEINKSVQVLHFETDVSAFVQASPYDTAHDLLTYTQVFGQSGLQKLDKLSPSEKNLVIEVALFNLATRFQLLDSNGHYQTISPDSLLQKSRGANLVNVYRVANNLADRISRDIEQFLLTYEPELETRADETVLENEETVDEHKTSVHQAISFREEGSLVIASLDVDLSQLDVQIGKTSHLPAYEELSLRRKFEILTYFDQIRNERSKVPSFRRGDFDTEMEMTPVFDGEELLTYLEADGSPYELKRTLTTVEEKELEKIGQAIRIENQEKLTQLGIDLSQFDPDRVGILLDAAGRFRLKNADLALLGGYPKASVTQLALATELLQMGLSHEKVEFFFGSQLSIEELRQVAYAFLHQELSREDAEQFEKDKGNQPDLTLRDWKSKLEKAEGKEVVDEEFAENPLVQRVLDTYPLGSLVSYKGQDFEVMSVSDARLNGLIRIELVNDFSDIIEQNPVLYVRTWEEVSQALHQPKAEPQTELEEADQELNLFSFLEEEPVQSIGLLEPDDSENGHNDTDLEETDNQIPEEEVVETIPEIPVTDFYFPEDLTDFYPKTARDKVETNIVAIRLVKNLEVEHRNASPSEQELLAKYVGWGGLANEFFDDYNPKFSKEREELKSLVTDKEYSDMKQSSLTAYYTDPSLIRQMWDKLERDGFTGGKILDPSMGTGNFFAAMPKHLREKSELYGVELDTITGAIAKHLHPNSHIEIKGFETVAFNDNSFDLVISNVPFANIRIADNRYDRPYMIHDYFVKKSLDLLHDGGQVAIISSTGTMDKRTENILQDIRETTEFLGGVRLPDSAFKAIAGTSVTTDMLFFQKHLDKGYVADDLAFSGSIRYDKDSRIWLNPYFDGEYNSQVLGTYEVRNFNGGTLSVKGTSDDLIASVETALNHVKAPREIDRNEVIINPDVLTKQVNDTSIPAEMRENLGQYSFGYQGSTVYYRDNKGIRVGTKTEEISYYVDEE

SEQ ID NO: 957 - protein, 1011 aa, Streptococcus agalactiae
GGKMNQEVLLQMMRATIPRDRALLEAFLYYQAEHFDEEWDSLIHQFMTNRQEINKSVQVLHFETDVSAFVQASPYDTAHDLLTYTQVFGQSGLQKLDKLSPSEKNLVIEVALFNLATRFQLLDSNGHYQTISPDSLLQKSRGANLVNVYRVANNLADRISRDIEQFLLTYEPELETRADETVLENEETVDEHKTSVHQAISFREEGSLVIASLDVDLSQLDVQIGKTSHLPAYEELSLRRKFEILTYFDQIRNERSKVPSFRRGDFDTEMEMTPVFDGEELLTYLEADGSPYELKRTLTTVEEKELEKIGQAIRIENQEKLTQLGIDLSQFDPDRVGILLDAAGRFRLKNADLALLGGYPKASVTQLALATELLQMGLSHEKVEFFFGSQLSIEELRQVAYAFLYQELSREDAEQFEKDKGNQPDLTLRDWKSKLEKAEGKEVVDEEFAENPLVQRVLDTYPLGSLVSYKGQDFEVMSVSDARLNGLIRIELVNDFSDIIEQNPVLYVRTWEEVSQALHQPKAEPQTELEEADQELNLFSFLEEEPVQSIGLLEPDDSENGHNDTDLEETDNQIPEEEVVETIPEIPVTDFYFPEDLTDFYPKTARDKVETNIVAIRLVKNLEVEHRNASPSEQELLAKYVGWGGLANEFFDDYNPKFSKEREELKSLVTDKEYSDMKQSSLTAYYTDPSLIRQMWDKLERDGFTGGKILDPSMGTGNFFAAMPKHLREKSELYGVELDTITGAIAKHLHPNSHIEIKGFETVAFNDNSFDLVISNVPFANIRIADNRYDRPYMIHDYFVKKSLDLLHDGGQVAIISSTGTMDKRTENILQDIRETTEFLGGVRLPDSAFKAIAGTSVTTDMLFFQKHLDKGYVADDLAFSGSIRYDKDSRIWLNPYFDGEYNSQVLGTYEVRNFNGGTLSVKGTSDDLIASVETALNHVKAPREIDRNEVIINPDVLTKQVNDTSIPAEMRENLGQYSFGYQGSTVYYRDNKGIRVGTKTEEISYYVDEE

SEQ ID NO: 958 - DNA, 2070 bp, Streptococcus agalactiae
atgaaaaagaaaattattttgaaaagtagtgttcttggtttagtcgctgggacttctattatgttctcaagcgtgttcgcggaccaagtcggtgtccaagttataggcgtcaatgactttcatggtgcacttgacaatactggaacagcaaatatgcctgatggaaaagttgctaatgctggtactgctgctcaattagatgcttatatggatgacgctcaaaaagatttcaaacaaactaaccctaatggtgaaagcattagggttcaagcaggcgatatggttggagcaagtccagccaactctgggcttcttcaagatgaaccaactgtcaaaaattttaatgcaatgaatgttgagtatggcacattgggtaaccatgaatttgatgaagggttggcagaatataatcgtatcgttactggtaaagcccctgctccagattctaatattaataatattacgaaatcatacccacatgaagctgcaaaacaagaaattgtagtggcaaatgttattgataaagttaacaaacaaattccttacaattggaagccttacgctattaaaaatattcctgtaaataacaaaagtgtgaacgttggctttatcgggattgtcaccaaagacatcccaaaccttgtcttacgtaaaaattatgaacaatatgaatttttagatgaagctgaaacaatcgttaaatacgccaaagaattacaagctaaaaatgtcaaagctattgtagttctcgcacatgtacctgcaacaagtaaaaatgatattgctgaaggtgaagcagcagaaatgatgaaaaaagtcaatcaactcttccctgaaaatagcgtagatattgtctttgctggacacaatcatcaatatacaaatggtcttgttggtaaaactcgtattgtacaagcgctctctcaaggaaaagcctatgctgatgtacgtggtgtcttagatactgatacacaagatttcattgagaccccttcagctaaagtaattgcagttgctcctggtaaaaaaacaggtagtgccgatattcaagccattgttgaccaagctaatactatcgttaaacaagtaacagaagctaaaattggtactgccgaggtaagtgtcatgattacgcgttctgttgatcaagataatgttagtccggtaggcagcctcatcacagaggctcaactagcaattgctcgaaaaagctggccagatatcgattttgccatgacaaataatggtggcattcgtgctgacttactcatcaaaccagatggaacaatcacctggggagctgcacaagcagttcaaccttttggtaatatcttacaagtcgtcgaaattactggtagagatctttataaagcactcaacgaacaatacgaccaaaaacaaaatttcttccttcaaatagctggtctgcgatacacttacacagataataaagagggcggggaagaaacaccatttaaagttgtaaaagcttataaatcaaatggtgaggaaatcaatcctgatgcaaaatacaaattagttatcaatgactttttattcggtggtggtgatggctttgcaagcttcagaaatgccaaacttctaggagccattaaccccgatacagaggtatttatggcctatatcactgatttagaaaaagctggtaaaaaagtgagcgttccaaataataaacctaaaatctatgtcactatgaagatggttaatgaaactattacacaaaatgatggtacacatagcattattaagaaactttatttagatcgacaaggaaatattgtagcacaagagattgtatcagacactttaaaccaaacaaaatcaaaatctacaaaaatcaaccctgtaactacaattcacaaaaaacaattacaccaatttacagctattaaccctatgagaaattatggcaaaccatcaaactccactactgtaaaatcaaaacaattaccaaaaacaaactctgaatatggacaatcattccttatgtctgtctttggtgttggacttataggaattgctttaaatacaaagaaaaaacatatgaaa

SEQ ID NO: 959 - DNA, 1883 bp, Streptococcus agalactiae
aagtcggtgtccaagttataggcgtcaatgactttcatggtgcacttgacaatactggaacagcaaatatgcctgacggaaaagttactaatgctggcactgctgctcaattagatgcttatatggatgatgctcaaaaagatttcaaacaaactaaccctaatggtgaaagcattagagttcaagctggtgatatggttggagcaagtccagctaactcagggcttcttcaagatgaaccaaccgttaaaacatttaatgcaatgaatgttgagtatggcacattaggtaaccatgaatttgatgaaggtttggcagaatacaatcgtatcgttactggaaaggcccctgctccagattctaatataaataatattacgaaatcatacccacacgaagctgcaaaacaagaaattgtagtggcaaacgttattgataaagttaacaaacaaatcccttacaattggaaaccttacgctattaaaaatattcctgtaaataacaaaagtgtgaacgttggctttatcggaatcgttaccaaagacatcccaaaccttgtcttacgtaaaaattatgaacaatatgaatttttagatgaagctgaaacaatcgttaaatacgccaaagaattacaagctaaaaatgtcaaggctattgtagtccttgctcatgtacctgcaacaagcaaggatgatattgctgaaggtgaagcagcagaaatgatgaaaaaagtcaatcaactcttccctgaaaatagcgtagatattgtctttgctggacacaatcatcaatatacaaatggtcttgttggtaaaactcgcattgtacaagcgctctctcaaggaaaagcctatgctgacgtacgtggtgtcctagatactgatacacaagatttcattgaaaccccttcagctaaagtagttgcagttgctcctggtaaaaaaacaggtagtgccgatattcaagccattgttgaccaagctaatactatcgttaaacaagtaacagaagctaaaattggtactgccgaggtaagtggcatgattacgcgttctgttgatcaagataatgttagtccagtaggcagcctcatcacagaggctcaactagcaattgctcgaaaaagctggccagatatcgattttgccatgacaaataatggtggcattcgtgctgacttactcatcaaaccagatggaacaatcacctggggagctgcacaagcagttcaaccttttggtaatatcttacaagtcgtcgaaattactggtagagatctttataaagcactcaacgaacaatacgaccaaaaacaaaatttcttccttcaaatagctggtctgcgatacacttacacagataataaagagggcggagaagaaacaccatttaaagttgtaaaagcttataaatcaaatggtgaagaaatcaatcctgatgcaaaatacaaattagttatcaatgactttttattcggtggtggtgatggctttgcaagcttcagaaatgccaaacttctaggagccattaatcccgatacagaggtatttatggcctatatcactgatttagaaaaagctggtaaaaaagtgagcgttccaaataataaacctaaaatctatgtcactatgaagatggttaatgaaactattacacaaaatgatggtacacatagcattattaagaaactttatttagatcgacaaggaaatattgtagcacaagagattgtatcagacactttaaaccaaacaaaatcaaaatctacaaaaatcaaccctgtaactacaattcacaaaaaacaattacaccaatttacagctattaaccctatgagaaattatggcaaaccatcaaactccactactgtaaaatcaaaacaa

SEQ ID NO: 960 - DNA, 1862 bp, Streptococcus agalactiae
gcgtcaatgactttcatggtgcacttgacaatactggaacagcaaatatgcctgacggaaaagttactaatgctggcactgctgctcaattagatgcttatatggatgatgctcaaaaagatttcaaacaaactaaccctaatggtgaaagcattagagttcaagctggtgatatggttggagcaagtccagctaactcagggcttcttcaagatgaaccaaccgttaaaacatttaatgcaatgaatgttgagtatggcacattaggtaaccatgaatttgatgaaggtttggcagaatacaatcgtatcgttactggaaaggcccctgctccagattctaatataaataatattacgaaatcatacccacacgaagctgcaaaacaagaaattgtagtggcaaacgttattgataaagttaacaaacaaatcccttacaattggaaaccttacactattaaaaatattcctgtaaataacaaaagtgtgaacgttggctttatcggaatcgttaccaaagacatcccaaaccttgtcttacgtaaaaattatgaacaatatgaatttttagatgaagctgaaacaatcgttaaatacgccaaagaattacaagctaaaaatgtcaaggctattgtagtccttgctcatgtacctgcaacaagcaaggatgatattgctgaaggtgaagcagcagaaatgatgaaaaaagtcaatcaactcttccctgaaaatagcgtagatattgtctttgctggacacaatcatcaatatacaaatggtcttgttggtaaaactcgtattgtacaagcgctctctcaaggaaaagcctatgctgatgtacgtggtgtcctagatactgatacacaagatttcattgaaaccccttcagctaaagtaattgcagttgctcctggtaaaaaaacaggtagtgccgatattcaagccattgttgaccaagctaatactatcgttaaacaagtaacagaagctaaaattggtactgccgaggtaagtggcatgattacgcgttctgttgatcaagataatgttagtccggtaggcagcctcatcacagaggctcaactagcaattgctcgaaaaagctggccagatatcgattttgccatgacaaataatggtggcattcgtgctgacttactcatcaaaccagatggaacaatcacctggggagctgcacaagcagttcaaccttttggtaatatcttacaagtcgtcgaaattactggtagagatctttataaagcactcaacgaacaatacgaccaaaaacaaaatttcttccttcaaatagctggtctgcgatacacttacacagataataaagagggcggggaagaaacaccatttaaagttgtaaaagcttataaatcaaatggtgaggaaatcaatcctgatgcaaaatacaaattagttatcaatgactttttattcggtggtggtgatggctttgcaagcttcagaaatgccaaacttctaggagccattaatcccgatacagaggtatttatggcctatatcactgatttagaaaaagctggtaaaaaagtgagcgttccaaataataaacctaaaatctatgtcactatgaagatggttaatgaaactattacacaaaatgatggtacatatagcattattaagaaactttatttagatcgacaaggaaatattgtagcacaagagattgtatcagacactttaaaccaaacaaaatcaaaatctacaaaaatcaaccctgtaactacaattcacaaaaaacaattacaccaatttacagctattaaccctatgagaaattatggcaaaccatcaaactccactactgtaaaatcaaaacaa

SEQ ID NO: 961 - DNA, 1881 bp, Streptococcus agalactiae
ccaagtcggtgtccaagttataggcgtcaatgactttcatggtgcacttgacaatactggaacagcaaatatgcctgacggaaaagttactaatgctggcactgctgctcaattagatgcttatatggatgatgctcaaaaagatttcaaacaaactaaccctaatggtgaaagcattagagttcaagctggtgatatggttggagcaagtccagctaactcagggcttcttcaagatgaaccaaccgttaaaacatttaatgcaatgaatgttgagtatggcacattaggtaaccatgaatttgatgaaggtttggcagaatacaatcgtatcgttactggaaaggcccctgctccagattctaatataaataatattacgaaatcatacccacacgaagctgcaaaacaagaaattgtagtggcaaacgttattgataaagttaacaaacaaatcccttacaattggaaaccttacactattaaaaatattcctgtaaataacaaaagtgtgaacgttggctttatcggaatcgttaccaaagacatcccaaaccttgtcttacgtaaaaattatgaacaatatgaatttttagatgaagctgaaacaatcgttaaatacgccaaagaattacaagctaaaaatgtcaaggctattgtagtccttgctcatgtacctgcaacaagcaaggatgatattgctgaaggtgaagcagcagaaatgatgaaaaaagtcaatcaactcttccctgaaaatagcgtagatattgtctttgctggacacaatcatcaatatacaaatggtcttgttggtaaaactcgtattgtacaagcgctctctcaaggaaaagcctatgctgatgtacgtggtgtcctagatactgatacacaagatttcattgaaaccccttcagctaaagtaattgcagttgctcctggtaaaaaaacaggtagtgccgatattcaagccattgttgaccaagctaatactatcgttaaacaagtaacagaagctaaaattggtactgccgaggtaagtggcatgattacgcgttctgttgatcaagataatgttagtccggtaggcagcctcatcacagaggctcaactagcaattgctcgaaaaagctggccagatatcgattttgccatgacaaataatggtggcattcgtgctgacttactcatcaaaccagatggaacaatcacctggggagctgcacaagcagttcaaccttttggtaatatcttacaagtcgtcgaaattactggtagagatctttataaagcactcaacgaacaatacgaccaaaaacaaaatttcttccttcaaatagctggtctgcgatacacttacacagataataaagagggcggggaagaaacaccatttaaagttgtaaaagcttataaatcaaatggtgaggaaatcaatcctgatgcaaaatacaaattagttatcaatgactttttattcggtggtggtgatggctttgcaagcttcagaaatgccaaacttctaggagccattaatcccgatacagaggtatttatggcctatatcactgatttagaaaaagctggtaaaaaagtgagcgttccaaataataaacctaaaatctatgtcactatgaagatggttaatgaaactattacacaaaatgatggtacatatagcattattaagaaactttatttagatcgacaaggaaatattgtagcacaagagattgtatcagacactttaaaccaaacaaaatcaaaatctacaaaaatcaaccctgtaactacaattcacaaaaaacaattacaccaatttacagctattaaccctatgagaaattatggcaaaccatcaaactccactactgtaaaatcaaa

SEQ ID NO: 962 - DNA, 1884 bp, Streptococcus agalactiae
  misc_feature 92: n = A,T,C or G
gaccaagtcggtgtccaagttataggcgtcaatgactttcatggtgcacttgacaatactggaacagcaaatatgcctgacggaaaagttantaatgctggcactgctgctcaattagatgcttatatggatgatgctcaaaaagatttcaaacaaactaaccctaatggtgaaagcattagagttcaagctggtgatatggttggagcaagtccagctaactcagggcttcttcaagatgaaccaaccgttaaaacatttaatgcaatgaatgttgagtatggcacattaggtaaccatgaatttgatgaaggtttggcagaatacaatcgtatcgttactggaaaggcccctgctccagattctaatataaataatattacgaaatcatacccacacgaagctgcaaaacaagaaattgtagtggcaaacgttattgataaagttaacaaacaaatcccttacaattggaaaccttacactattaaaaatattcctgtaaataacaaaagtgtgaacgttggctttatcggaatcgttaccaaagacatcccaaaccttgtcttacgtaaaaattatgaacaatatgaatttttagatgaagctgaaacaatcgttaaatacgccaaagaattacaagctaaaaatgtcaaggctattgtagtccttgctcatgtacctgcaacaagcaaggatgatattgctgaaggtgaagcagcagaaatgatgaaaaaagtcaatcaactcttccctgaaaatagcgtagatattgtctttgctggacacaatcatcaatatacaaatggtcttgttggtaaaactcgtattgtacaagcgctctctcaaggaaaagcctatgctgatgtacgtggtgtcctagatactgatacacaagatttcattgaaaccccttcagctaaagtaattgcagttgctcctggtaaaaaaacaggtagtgccgatattcaagccattgttgaccaagctaatactatcgttaaacaagtaacagaagctaaaattggtactgccgaggtaagtggcatgattacgcgttctgttgatcaagataatgttagtccggtaggcagcctcatcacagaggctcaactagcaattgctcgaaaaagctggccagatatcgattttgccatgacaaataatggtggcattcgtgctgacttactcatcaaaccagatggaacaatcacctggggagctgcacaagcagttcaaccttttggtaatatcttacaagtcgtcgaaattactggtagagatctttataaagcactcaacgaacaatacgaccaaaaacaaaatttcttccttcaaatagctggtctgcgatacacttacacagataataaagagggcggggaagaaacaccatttaaagttgtaaaagcttataaatcaaatggtgaggaaatcaatcctgatgcaaaatacaaattagttatcaatgactttttattcggtggtggtgatggctttgcaagcttcagaaatgccaaacttctaggagccattaatcccgatacagaggtatttatggcctatatcactgatttagaaaaagctggtaaaaaagtgagcgttccaaataataaacctaaaatctatgtcactatgaagatggttaatgaaactattacacaaaatgatggtacatatagcattattaagaaactttatttagatcgacaaggaaatattgtagcacaagagattgtatcagacactttaaaccaaacaaaatcaaaatctacaaaaatcaaccctgtaactacaattcacaaaaaacaattacaccaatttacagctattaaccctatgagaaattatggcaaaccatcaaactccactactgtaaaatcaaaa

SEQ ID NO: 963 - DNA, 1886 bp, Streptococcus agalactiae
accaagtcggtgtccaagttataggcgtcaatgactttcatggtgcacttgacaatactggaacagcaaatatgcctgacggaaaagttactaatgctggcactgctgctcaattagatgcttatatggatgatgctcaaaaagatttcaaacaaactaaccctaatggtgaaagcattagagttcaagctggtgatatggttggagcaagtccagctaactcagggcttcttcaagatgaaccaaccgttaaaacatttaatgcaatgaatgttgagtatggcacattaggtaaccatgaatttgatgaaggtttggcagaatacaatcgtatcgttactggaaaggcccctgctccagattctaatataaataatattacgaaatcatacccacacgaagctgcaaaacaagaaattgtagtggcaaacgttattgataaagttaacaaacaaatcccttacaattggaaaccttacactattaaaaatattcctgtaaataacaaaagtgtgaacgttggctttatcggaatcgttaccaaagacatcccaaaccttgtcttacgtaaaaattatgaacaatatgaatttttagatgaagctgaaacaatcgttaaatacgccaaagaattacaagctaaaaatgtcaaggctattgtagtccttgctcatgtacctgcaacaagcaaggatgatattgctgaaggtgaagcagcagaaatgatgaaaaaagtcaatcaactcttccctgaaaatagcgtagatattgtctttgctggacacaatcatcaatatacaaatggtcttgttggtaaaactcgtattgtacaagcgctctctcaaggaaaagcctatgctgatgtacgtggtgtcctagatactgatacacaagatttcattgaaaccccttcagctaaagtaattgcagttgctcctggtaaaaaaacaggtagtgccgatattcaagccattgttgaccaagctaatactatcgttaaacaagtaacagaagctaaaattggtactgccgaggtaagtggcatgattacgcgttctgttgatcaagataatgttagtccggtaggcagcctcatcacagaggctcaactagcaattgctcgaaaaagctggccagatatcgattttgccatgacaaataatggtggcattcgtgctgacttactcatcaaaccagatggaacaatcacctggggagctgcacaagcagttcaaccttttggtaatatcttacaagtcgtcgaaattactggtagagatctttataaagcactcaacgaacaatacgaccaaaaacaaaatttcttccttcaaatagctggtctgcgatacacttacacagataataaagagggcggggaagaaacaccatttaaagttgtaaaagcttataaatcaaatggtgaggaaatcaatcctgatgcaaaatacaaattagttatcaatgactttttattcggtggtggtgatggctttgcaagcttcagaaatgccaaacttctaggagccattaatcccgatacagaggtatttatggcctatatcactgatttagaaaaagctggtaaaaaagtgagcattccaaataataaacctaaaatctatgtcactatgaagatggttaatgaaactattacacaaaatgatggtacatatagcattattaagaaactttatttagatcgacaaggaaatattgtagcacaagagattgtatcagacactttaaaccaaacaaaatcaaaatctacaaaaatcaaccctgtaactacaattcacaaaaaacaattacaccaatttacagctattaaccctatgagaaattatggcaaaccatcaaactccactactgtaaaatcaaaacaa

SEQ ID NO: 964 - DNA, 1882 bp, Streptococcus agalactiae
accaagtcggtgtccaagttataggcgtcaatgactttcatggtgcacttgacaatactggaacagcaaatatgcctgacggaaaagttactaatgctggcactgctgctcaattagatgcttatatggatgatgctcaaaaagatttcaaacaaactaaccctaatggtgaaagcattagagttcaagctggtgatatggttggagcaagtccagctaactcagggcttcttcaagatgaaccaaccgttaaaacatttaatgcaatgaatgttgagtatggcacattaggtaaccatgaatttgatgaaggtttggcagaatacaatcgtatcgttactggaaaggcccctgctccagattctaatataaataatattacgaaatcatacccacacgaagctgcaaaacaagaaattgtagtggcaaacgttattgataaagttaacaaacaaatcccttacaattggaaaccttacactattaaaaatattcctgtaaataacaaaagtgtgaacgttggctttatcggaatcgttaccaaagacatcccaaaccttgtcttacgtaaaaattatgaacaatatgaatttttagatgaagctgaaacaatcgttaaatacgccaaagaattacaagctaaaaatgtcaaggctattgtagtccttgctcatgtacctgcaacaagcaaggatgatattgctgaaggtgaagcagcagaaatgatgaaaaaagtcaatcaactcttccctgaaaatagcgtagatattgtctttgctggacacaatcatcaatatacaaatggtcttgttggtaaaactcgtattgtacaagcgctctctcaaggaaaagcctatgctgatgtacgtggtgtcctagatactgatacacaagatttcattgaaaccccttcagctaaagtaattgcagttgctcctggtaaaaaaacaggtagtgccgatattcaagccattgttgaccaagctaatactatcgttaaacaagtaacagaagctaaaattggtactgccgaggtaagtggcatgattacgcgttctgttgatcaagataatgttagtccggtaggcagcctcatcacagaggctcaactagcaattgctcgaaaaagctggccagatatcgattttgccatgacaaataatggtggcattcgtgctgacttactcatcaaaccagatggaacaatcacctggggagctgcacaagcagttcaaccttttggtaatatcttacaagtcgtcgaaattactggtagagatctttataaagcactcaacgaacaatacgaccaaaaacaaaatttcttccttcaaatagctggtctgcgatacacttacacagataataaagagggcggggaagaaacaccatttaaagttgtaaaagcttataaatcaaatggtgaggaaatcaatcctgatgcaaaatacaaattagttatcaatgactttttattcggtggtggtgatggctttgcaagcttcagaaatgccaaacttctaggagccattaatcccgatacagaggtatttatggcctatatcactgatttagaaaaagctggtaaaaaagtgagcattccaaataataaacctaaaatctatgtcactatgaagatggttaatgaaactattacacaaaatgatggtacatatagcattattaagaaactttatttagatcgacaaggaaatattgtagcacaagagattgtatcagacactttaaaccaaacaaaatcaaaatctacaaaaatcaaccctgtaactacaattcacaaaaaacaattacaccaatttacagctattaaccctatgagaaattatggcaaaccatcaaactccactactgtaaaatcaaa

SEQ ID NO: 965 - DNA, 1880 bp, Streptococcus agalactiae
caagtcggtgtccaagttataggcgtcaatgactttcatggtgcacttgacaatactggaacagcaaatatgcctgacggaaaagttactaatgctggcactgctgctcaattagatgcttatatggatgatgctcaaaaagatttcaaacaaactaaccctaatggtgaaagcattagagttcaagctggtgatatggttggagcaagtccagctaactcagggcttcttcaagatgaaccaaccgttaaaacatttaatgcaatgaatgttgagtatggcacattaggtaaccatgaatttgatgaaggtttggcagaatacaatcgtatcgttactggaaaggcccctgctccagattctaatataaataatattacgaaatcatacccacacgaagctgcaaaacaagaaattgtagtggcaaacgttattgataaagttaacaaacaaatcccttacaattggaaaccttacactattaaaaatattcctgtaaataacaaaagtgtgaacgttggctttatcggaatcgttaccaaagacatcccaaaccttgtcttacgtaaaaattatgaacaatatgaatttttagatgaagctgaaacaatcgttaaatacgccaaagaattacaagctaaaaatgtcaaggctattgtagtccttgctcatgtacctgcaacaagcaaggatgatattgctgaaggtgaagcagcagaaatgatgaaaaaagtcaatcaactcttccctgaaaatagcgtagatattgtctttgctggacacaatcatcaatatacaaatggtcttgttggtaaaactcgtattgtacaagcgctctctcaaggaaaagcctatgctgatgtacgtggtgtcctagatactgatacacaagatttcattgaaaccccttcagctaaagtaattgcagttgctcctggtaaaaaaacaggtagtgccgatattcaagccattgttgaccaagctaatactatcgttaaacaagtaacagaagctaaaattggtactgccgaggtaagtggcatgattacgcgttctgttgatcaagataatgttagtccggtaggcagcctcatcacagaggctcaactagcaattgctcgaaaaagctggccagatatcgattttgccatgacaaataatggtggcattcgtgctgacttactcatcaaaccagatggaacaatcacctggggagctgcacaagcagttcaaccttttggtaatatcttacaagtcgtcgaaattactggtagagatctttataaagcactcaacgaacaatacgaccaaaaacaaaatttcttccttcaaatagctggtctgcgatacacttacacagataataaagagggcggggaagaaacaccatttaaagttgtaaaagcttataaatcaaatggtgaggaaatcaatcctgatgcaaaatacaaattagttatcaatgactttttattcggtggtggtgatggctttgcaagcttcagaaatgccaaacttctaggagccattaatcccgatacagaggtatttatggcctatatcactgatttagaaaaagctggtaaaaaagtgagcattccaaataataaacctaaaatctatgtcactatgaagatggttaatgaaactattacacaaaatgatggtacatatagcattattaagaaactttatttagatcgacaaggaaatattgtagcacaagagattgtatcagacactttaaaccaaacaaaatcaaaatctacaaaaatcaaccctgtaactacaattcacaaaaaacaattacaccaatttacagctattaaccctatgagaaattatggcaaaccatcaaactccactactgtaaaatcaaa

SEQ ID NO: 966 - DNA, 1881 bp, Streptococcus agalactiae
gaccaagtcggtgtccaagttataggcgtcaatgactttcatggtgcacttgacaatactggaacagcaaatatgcctgacggaaaagttactaatgctggcactgctgctcaattagatgcttatatggatgatgctcaaaaagatttcaaacaaactaaccctaatggtgaaagcattagagttcaagctggtgatatggttggagcaagtccagctaactcagggcttcttcaagatgaaccaaccgttaaaacatttaatgcaatgaatgttgagtatggcacattaggtaaccatgaatttgatgaaggtttggcagaatacaatcgtatcgttactggaaaggcccctgctccagattctaatataaataatattacgaaatcatacccacacgaagctgcaaaacaagaaattgtagtggcaaacgttattgataaagttaacaaacaaatcccttacaattggaaaccttacgctattaaaaatattcctgtaaataacaaaagtgtgaacgttggctttatcggaatcgttaccaaagacatcccaaaccttgtcttacgtaaaaattatgaacaatatgaatttttagatgaagctgaaacaatcgttaaatacgccaaagaattacaagctaaaaatgtcaaggctattgtagtccttgctcatgtacctgcaacaagcaaggatgatattgctgaaggtgaagcagcagaaatgatgaaaaaagtcaatcaactcttccctgaaaatagcgtagatattgtctttgctggacacaatcatcaatatacaaatggtcttgttggtaaaactcgcattgtacaagcgctctctcaaggaaaagcctatgctgacgtacgtggtgtcctagatactgatacacaagatttcattgaaaccccttcagctaaagtagttgcagttgctcctggtaaaaaaacaggtagtgccgatattcaagccattgttgaccaagctaatactatcgttaaacaagtaacagaagctaaaattggtactgccgaggtaagtggcatgattacgcgttctgttgatcaagataatgttagtccagtaggcagcctcatcacagaggctcaactagcaattgctcgaaaaagctggccagatatcgattttgccatgacaaataatggtggcattcgtgctgacttactcatcaaaccagatggaacaatcacctggggagctgcacaagcagttcaaccttttggtaatatcttacaagtcgtcgaaattactggtagagatctttataaagcactcaacgaacaatacgaccaaaaacaaaatttcttccttcaaatagctggtctgcgatacacttacacagataataaagagggcggagaagaaacaccatttaaagttgtaaaagcttataaatcaaatggtgaagaaatcaatcctgatgcaaaatacaaattagttatcaatgactttttattcggtggtggtgatggctttgcaagcttcagaaatgccaaacttctaggagccattaatcccgatacagaggtatttatggcctatatcactgatttagaaaaagctggtaaaaaagtgagcgttccaaataataaacctaaaatctatgtcactatgaagatggttaatgaaactattacacaaaatgatggtacacatagcattattaagaaactttatttagatcgacaaggaaatattgtagcacaagagattgtatcagacactttaaaccaaacaaaatcaaaatctacaaaaatcaaccctgtaactacaattcacaaaaaacaattacaccaatttacagctattaaccctatgagaaattatggcaaaccatcaaactccactactgtaaaatca

SEQ ID NO: 967 - DNA, 1880 bp, Streptococcus agalactiae
caagtcggtgtccaagttataggcgtcaatgactttcatggtgcacttgacaatactggaacagcaaatatgcctgatggaaaagttgctaatgctggtactgctgctcaattagatgcttatatggatgacgctcaaaaagatttcaaacaaactaaccctaatggtgaaagcattagggttcaagcaggcgatatggttggagcaagtccagccaactctgggcttcttcaagatgaaccaactgtcaaaaattttaatgcaatgaatgttgagtatggcacattgggtaaccatgaatttgatgaagggttggcagaatataatcgtatcgttactggtaaagcccctgctccagattctaatattaataatattacgaaatcatacccacatgaagctgcaaaacaagaaattgtagtggcaaatgttattgataaagttaacaaacaaattccttacaattggaagccttacgctattaaaaatattcctgtaaataacaaaagtgtgaacgttggctttatcgggattgtcaccaaagacatcccaaaccttgtcttacgtaaaaattatgaacaatatgaatttttagatgaagctgaaacaatcgttaaatacgccaaagaattacaagctaaaaatgtcaaagctattgtagttctcgcacatgtacctgcaacaagtaaaaatgatattgctgaaggtgaagcagcagaaatgatgaaaaaagtcaatcaactcttccctgaaaatagcgtagatattgtctttgctggacacaatcatcaatatacaaatggtcttgttggtaaaactcgtattgtacaagcgctctctcaaggaaaagcctatgctgatgtacgtggtgtcttagatactgatacacaagatttcattgagaccccttcagctaaagtaattgcagttgctcctggtaaaaaaacaggtagtgccgatattcaagccattgttgaccaagctaatactatcgttaaacaagtaacagaagctaaaattggtactgccgaggtaagtgtcatgattacgcgttctgttgatcaagataatgttagtccggtaggcagcctcatcacagaggctcaactagcaattgctcgaaaaagctggccagatatcgattttgccatgacaaataatggtggcattcgtgctgacttactcatcaaaccagatggaacaatcacctggggagctgcacaagcagttcaaccttttggtaatatcttacaagtcgtcgaaattactggtagagatctttataaagcactcaacgaacaatacgaccaaaaacaaaatttcttccttcaaatagctggtctgcgatacacttacacagataataaagagggcggggaagaaacaccatttaaagttgtaaaagcttataaatcaaatggtgaggaaatcaatcctgatgcaaaatacaaattagttatcaatgactttttattcggtggtggtgatggctttgcaagcttcagaaatgccaaacttctaggagccattaaccccgatacagaggtatttatggcctatatcactgatttagaaaaagctggtaaaaaagtgagcgttccaaataataaacctaaaatctatgtcactatgaagatggttaatgaaactattacacaaaatgatggtacacatagcattattaagaaactttatttagatcgacaaggaaatattgtagcacaagagattgtatcagacactttaaaccaaacaaaatcaaaatctacaaaaatcaaccctgtaactacaattcacaaaaaacaattacaccaatttacagctattaaccctatgagaaattatggcaaaccatcaaactccactactgtaaaatcaaa

SEQ ID NO: 968 - DNA, 1876 bp, Streptococcus agalactiae
cggtgtccaagttataggcgtcaatgactttcatggtgcacttgacaatactggaacagcaaatatgcctgacggaaaagttactaatgctggcactgctgctcaattagatgcttatatggatgatgctcaaaaagatttcaaacaaactaaccctaatggtgaaagcattagagttcaagctggtgatatggttggagcaagtccagctaactcagggcttcttcaagatgaaccaaccgttaaaacatttaatgcaatgaatgttgagtatggcacattaggtaaccatgaatttgatgaaggtttggcagaatacaatcgtatcgttactggaaaggcccctgctccagattctaatataaataatattacgaaatcatacccacacgaagctgcaaaacaagaaattgtagtggcaaacgttattgataaagttaacaaacaaatcccttacaattggaaaccttacactattaaaaatattcctgtaaataacaaaagtgtgaacgttggctttatcggaatcgttaccaaagacatcccaaaccttgtcttacgtaaaaattatgaacaatatgaatttttagatgaagctgaaacaatcgttaaatacgccaaagaattacaagctaaaaatgtcaaggctattgtagtccttgctcatgtacctgcaacaagcaaggatgatattgctgaaggtgaagcagcagaaatgatgaaaaaagtcaatcaactcttccctgaaaatagcgtagatattgtctttgctggacacaatcatcaatatacaaatggtcttgttggtaaaactcgtattgtacaagcgctctctcaaggaaaagcctatgctgatgtacgtggtgtcctagatactgatacacaagatttcattgaaaccccttcagctaaagtaattgcagttgctcctggtaaaaaaacaggtagtgccgatattcaagccattgttgaccaagctaatactatcgttaaacaagtaacagaagctaaaattggtactgccgaggtaagtggcatgattacgcgttctgttgatcaagataatgttagtccggtaggcagcctcatcacagaggctcaactagcaattgctcgaaaaagctggccagatatcgattttgccatgacaaataatggtggcattcgtgctgacttactcatcaaaccagatggaacaatcacctggggagctgcacaagcagttcaaccttttggtaatatcttacaagtcgtcgaaattactggtagagatctttataaagcactcaacgaacaatacgaccaaaaacaaaatttcttccttcaaatagctggtctgcgatacacttacacagataataaagagggcggggaagaaacaccatttaaagttgtaaaagcttataaatcaaatggtgaggaaatcaatcctgatgcaaaatacaaattagttatcaatgactttttattcggtggtggtgatggctttgcaagcttcagaaatgccaaacttctaggagccattaatcccgatacagaggtatttatggcctatatcactgatttagaaaaagctggtaaaaaagtgagcgttccaaataataaacctaaaatctatgtcactatgaagatggttaatgaaactattacacaaaatgatggtacatatagcattattgagaaactttatttagatcgacaaggaaatattgtagcacaagagattgtatcagacactttaaaccaaacaaaatcaaaatctacaaaaatcaaccctgtaactacaattcacaaaaaacaattacaccaatttacagctattaaccctatgagaaattatggcaaaccatcaaactccactactgtaaaatcaaaa

SEQ ID NO: 969 - protein, 690 aa, Streptococcus agalactiae
MKKKIILKSSVLGLVAGTSIMFSSVFADQVGVQVIGVNDFHGALDNTGTANMPDGKVANAGTAAQLDAYMDDAQKDFKQTNPNGESIRVQAGDMVGASPANSGLLQDEPTVKNFNAMNVEYGTLGNHEFDEGLAEYNRIVTGKAPAPDSNINNITKSYPHEAAKQEIVVANVIDKVNKQIPYNWKPYAIKNIPVNNKSVNVGFIGIVTKDIPNLVLRKNYEQYEFLDEAETIVKYAKELQAKNVKAIVVLAHVPATSKNDIAEGEAAEMMKKVNQLFPENSVDIVFAGHNHQYTNGLVGKTRIVQALSQGKAYADVRGVLDTDTQDFIETPSAKVIAVAPGKKTGSADIQAIVDQANTIVKQVTEAKIGTAEVSVMITRSVDQDNVSPVGSLITEAQLAIARKSWPDIDFAMTNNGGIRADLLIKPDGTITWGAAQAVQPFGNILQVVEITGRDLYKALNEQYDQKQNFFLQIAGLRYTYTDNKEGGEETPFKVVKAYKSNGEEINPDAKYKLVINDFLFGGGDGFASFRNAKLLGAINPDTEVFMAYITDLEKAGKKVSVPNNKPKIYVTMKMVNETITQNDGTHSIIKKLYLDRQGNIVAQEIVSDTLNQTKSKSTKINPVTTIHKKQLHQFTAINPMRNYGKPSNSTTVKSKQLPKTNSEYGQSFLMSVFGVGLIGIALNTKKKHMK

SEQ ID NO: 970 - protein, 627 aa, Streptococcus agalactiae
VGVQVIGVNDFHGALDNTGTANMPDGKVTNAGTAAQLDAYMDDAQKDFKQTNPNGESIRVQAGDMVGASPANSGLLQDEPTVKTFNAMNVEYGTLGNHEFDEGLAEYNRIVTGKAPAPDSNINNITKSYPHEAAKQEIVVANVIDKVNKQIPYNWKPYAIKNIPVNNKSVNVGFIGIVTKDIPNLVLRKNYEQYEFLDEAETIVKYAKELQAKNVKAIVVLAHVPATSKDDIAEGEAAEMMKKVNQLFPENSVDIVFAGHNHQYTNGLVGKTRIVQALSQGKAYADVRGVLDTDTQDFIETPSAKVVAVAPGKKTGSADIQAIVDQANTIVKQVTEAKIGTAEVSGMITRSVDQDNVSPVGSLITEAQLAIARKSWPDIDFAMTNNGGIRADLLIKPDGTITWGAAQAVQPFGNILQVVEITGRDLYKALNEQYDQKQNFFLQIAGLRYTYTDNKEGGEETPFKVVKAYKSNGEEINPDAKYKLVINDFLFGGGDGFASFRNAKLLGAINPDTEVFMAYITDLEKAGKKVSVPNNKPKIYVTMKMVNETITQNDGTHSIIKKLYLDRQGNIVAQEIVSDTLNQTKSKSTKINPVTTIHKKQLHQFTAINPMRNYGKPSNSTTVKSKQ

SEQ ID NO: 971 - protein, 620 aa, Streptococcus agalactiae
VNDFHGALDNTGTANMPDGKVTNAGTAAQLDAYMDDAQKDFKQTNPNGESIRVQAGDMVGASPANSGLLQDEPTVKTFNAMNVEYGTLGNHEFDEGLAEYNRIVTGKAPAPDSNINNITKSYPHEAAKQEIVVANVIDKVNKQIPYNWKPYTIKNIPVNNKSVNVGFIGIVTKDIPNLVLRKNYEQYEFLDEAETIVKYAKELQAKNVKAIVVLAHVPATSKDDIAEGEAAEMMKKVNQLFPENSVDIVFAGHNHQYTNGLVGKTRIVQALSQGKAYADVRGVLDTDTQDFIETPSAKVIAVAPGKKTGSADIQAIVDQANTIVKQVTEAKIGTAEVSGMITRSVDQDNVSPVGSLITEAQLAIARKSWPDIDFAMTNNGGIRADLLIKPDGTITWGAAQAVQPFGNILQVVEITGRDLYKALNEQYDQKQNFFLQIAGLRYTYTDNKEGGEETPFKVVKAYKSNGEEINPDAKYKLVINDFLFGGGDGFASFRNAKLLGAINPDTEVFMAYITDLEKAGKKVSVPNNKPKIYVTMKMVNETITQNDGTYSIIKKLYLDRQGNIVAQEIVSDTLNQTKSKSTKINPVTTIHKKQLHQFTAINPMRNYGKPSNSTTVKSKQ

SEQ ID NO: 972 - protein, 626 aa, Streptococcus agalactiae
QVGVQVIGVNDFHGALDNTGTANMPDGKVTNAGTAAQLDAYMDDAQKDFKQTNPNGESIRVQAGDMVGASPANSGLLQDEPTVKTFNAMNVEYGTLGNHEFDEGLAEYNRIVTGKAPAPDSNINNITKSYPHEAAKQEIVVANVIDKVNKQIPYNWKPYTIKNIPVNNKSVNVGFIGIVTKDIPNLVLRKNYEQYEFLDEAETIVKYAKELQAKNVKAIVVLAHVPATSKDDIAEGEAAEMMKKVNQLFPENSVDIVFAGHNHQYTNGLVGKTRIVQALSQGKAYADVRGVLDTDTQDFIETPSAKVIAVAPGKKTGSADIQAIVDQANTIVKQVTEAKIGTAEVSGMITRSVDQDNVSPVGSLITEAQLAIARKSWPDIDFAMTNNGGIRADLLIKPDGTITWGAAQAVQPFGNILQVVEITGRDLYKALNEQYDQKQNFFLQIAGLRYTYTDNKEGGEETPFKVVKAYKSNGEEINPDAKYKLVINDFLFGGGDGFASFRNAKLLGAINPDTEVFMAYITDLEKAGKKVSVPNNKPKIYVTMKMVNETITQNDGTYSIIKKLYLDRQGNIVAQEIVSDTLNQTKSKSTKINPVTTIHKKQLHQFTAINPMRNYGKPSNSTTVKS

SEQ ID NO: 973 - protein, 628 aa, Streptococcus agalactiae
  VARIANT 31: Xaa = Any Amino Acid
DQVGVQVIGVNDFHGALDNTGTANMPDGKVXNAGTAAQLDAYMDDAQKDFKQTNPNGESIRVQAGDMVGASPANSGLLQDEPTVKTFNAMNVEYGTLGNHEFDEGLAEYNRIVTGKAPAPDSNINNITKSYPHEAAKQEIVVANVIDKVNKQIPYNWKPYTIKNIPVNNKSVNVGFIGIVTKDIPNLVLRKNYEQYEFLDEAETIVKYAKELQAKNVKAIVVLAHVPATSKDDIAEGEAAEMMKKVNQLFPENSVDIVFAGHNHQYTNGLVGKTRIVQALSQGKAYADVRGVLDTDTQDFIETPSAKVIAVAPGKKTGSADIQAIVDQANTIVKQVTEAKIGTAEVSGMITRSVDQDNVSPVGSLITEAQLAIARKSWPDIDFAMTNNGGIRADLLIKPDGTITWGAAQAVQPFGNILQVVEITGRDLYKALNEQYDQKQNFFLQIAGLRYTYTDNKEGGEETPFKVVKAYKSNGEEINPDAKYKLVINDFLFGGGDGFASFRNAKLLGAINPDTEVFMAYITDLEKAGKKVSVPNNKPKIYVTMKMVNETITQNDGTYSIIKKLYLDRQGNIVAQEIVSDTLNQTKSKSTKINPVTTIHKKQLHQFTAINPMRNYGKPSNSTTVKSK

SEQ ID NO: 974 - protein, 628 aa, Streptococcus agalactiae
QVGVQVIGVNDFHGALDNTGTANMPDGKVTNAGTAAQLDAYMDDAQKDFKQTNPNGESIRVQAGDMVGASPANSGLLQDEPTVKTFNAMNVEYGTLGNHEFDEGLAEYNRIVTGKAPAPDSNINNITKSYPHEAAKQEIVVANVIDKVNKQIPYNWKPYTIKNIPVNNKSVNVGFIGIVTKDIPNLVLRKNYEQYEFLDEAETIVKYAKELQAKNVKAIVVLAHVPATSKDDIAEGEAAEMMKKVNQLFPENSVDIVFAGHNHQYTNGLVGKTRIVQALSQGKAYADVRGVLDTDTQDFIETPSAKVIAVAPGKKTGSADIQAIVDQANTIVKQVTEAKIGTAEVSGMITRSVDQDNVSPVGSLITEAQLAIARKSWPDIDFAMTNNGGIRADLLIKPDGTITWGAAQAVQPFGNILQVVEITGRDLYKALNEQYDQKQNFFLQIAGLRYTYTDNKEGGEETPFKVVKAYKSNGEEINPDAKYKLVINDFLFGGGDGFASFRNAKLLGAINPDTEVFMAYITDLEKAGKKVSIPNNKPKIYVTMKMVNETITQNDGTYSIIKKLYLDRQGNIVAQEIVSDTLNQTKSKSTKINPVTTIHKKQLHQFTAINPMRNYGKPSNSTTVKSKQ

SEQ ID NO: 975 - protein, 626 aa, Streptococcus agalactiae
QVGVQVIGVNDFHGALDNTGTANMPDGKVTNAGTAAQLDAYMDDAQKDFKQTNPNGESIRVQAGDMVGASPANSGLLQDEPTVKTFNAMNVEYGTLGNHEFDEGLAEYNRIVTGKAPAPDSNINNITKSYPHEAAKQEIVVANVIDKVNKQIPYNWKPYTIKNIPVNNKSVNVGFIGIVTKDIPNLVLRKNYEQYEFLDEAETIVKYAKELQAKNVKAIVVLAHVPATSKDDIAEGEAAEMMKKVNQLFPENSVDIVFAGHNHQYTNGLVGKTRIVQALSQGKAYADVRGVLDTDTQDFIETPSAKVIAVAPGKKTGSADIQAIVDQANTIVKQVTEAKIGTAEVSGMITRSVDQDNVSPVGSLITEAQLAIARKSWPDIDFAMTNNGGIRADLLIKPDGTITWGAAQAVQPFGNILQVVEITGRDLYKALNEQYDQKQNFFLQIAGLRYTYTDNKEGGEETPFKVVKAYKSNGEEINPDAKYKLVINDFLFGGGDGFASFRNAKLLGAINPDTEVFMAYITDLEKAGKKVSIPNNKPKIYVTMKMVNETITQNDGTYSIIKKLYLDRQGNIVAQEIVSDTLNQTKSKSTKINPVTTIHKKQLHQFTAINPMRNYGKPSNSTTVKS

SEQ ID NO: 976 - protein, 626 aa, Streptococcus agalactiae; identical to SEQ ID NO: 975

SEQ ID NO: 977 - protein, 627 aa, Streptococcus agalactiae
DQVGVQVIGVNDFHGALDNTGTANMPDGKVTNAGTAAQLDAYMDDAQKDFKQTNPNGESIRVQAGDMVGASPANSGLLQDEPTVKTFNAMNVEYGTLGNHEFDEGLAEYNRIVTGKAPAPDSNINNITKSYPHEAAKQEIVVANVIDKVNKQIPYNWKPYAIKNIPVNNKSVNVGFIGIVTKDIPNLVLRKNYEQYEFLDEAETIVKYAKELQAKNVKAIVVLAHVPATSKDDIAEGEAAEMMKKVNQLFPENSVDIVFAGHNHQYTNGLVGKTRIVQALSQGKAYADVRGVLDTDTQDFIETPSAKVVAVAPGKKTGSADIQAIVDQANTIVKQVTEAKIGTAEVSGMITRSVDQDNVSPVGSLITEAQLAIARKSWPDIDFAMTNNGGIRADLLIKPDGTITWGAAQAVQPFGNILQVVEITGRDLYKALNEQYDQKQNFFLQIAGLRYTYTDNKEGGEETPFKVVKAYKSNGEEINPDAKYKLVINDFLFGGGDGFASFRNAKLLGAINPDTEVFMAYITDLEKAGKKVSVPNNKPKIYVTMKMVNETITQNDGTHSIIKKLYLDRQGNIVAQEIVSDTLNQTKSKSTKINPVTTIHKKQLHQFTAINPMRNYGKPSNSTTVKS

SEQ ID NO: 978 - protein, 626 aa, Streptococcus agalactiae
QVGVQVIGVNDFHGALDNTGTANMPDGKVANAGTAAQLDAYMDDAQKDFKQTNPNGESIRVQAGDMVGASPANSGLLQDEPTVKNFNAMNVEYGTLGNHEFDEGLAEYNRIVTGKAPAPDSNINNITKSYPHEAAKQEIVVANVIDKVNKQIPYNWKPYAIKNIPVNNKSVNVGFIGIVTKDIPNLVLRKNYEQYEFLDEAETIVKYAKELQAKNVKAIVVLAHVPATSKNDIAEGEAAEMMKKVNQLFPENSVDIVFAGHNHQYTNGLVGKTRIVQALSQGKAYADVRGVLDTDTQDFIETPSAKVIAVAPGKKTGSADIQAIVDQANTIVKQVTEAKIGTAEVSVMITRSVDQDNVSPVGSLITEAQLAIARKSWPDIDFAMTNNGGIRADLLIKPDGTITWGAAQAVQPFGNILQVVEITGRDLYKALNEQYDQKQNFFLQIAGLRYTYTDNKEGGEETPFKVVKAYKSNGEEINPDAKYKLVINDFLFGGGDGFASFRNAKLLGAINPDTEVFMAYITDLEKAGKKVSVPNNKPKIYVTMKMVNETITQNDGTHSIIKKLYLDRQGNIVAQEIVSDTLNQTKSKSTKINPVTTIHKKQLHQFTAINPMRNYGKPSNSTTVKS

SEQ ID NO: 979 - protein, 625 aa, Streptococcus agalactiae
GVQVIGVNDFHGALDNTGTANMPDGKVTNAGTAAQLDAYMDDAQKDFKQTNPNGESIRVQAGDMVGASPANSGLLQDEPTVKTFNAMNVEYGTLGNHEFDEGLAEYNRIVTGKAPAPDSNINNITKSYPHEAAKQEIVVANVIDKVNKQIPYNWKPYTIKNIPVNNKSVNVGFIGIVTKDIPNLVLRKNYEQYEFLDEAETIVKYAKELQAKNVKAIVVLAHVPATSKDDIAEGEAAEMMKKVNQLFPENSVDIVFAGHNHQYTNGLVGKTRIVQALSQGKAYADVRGVLDTDTQDFIETPSAKVIAVAPGKKTGSADIQAIVDQANTIVKQVTEAKIGTAEVSGMITRSVDQDNVSPVGSLITEAQLAIARKSWPDIDFAMTNNGGIRADLLIKPDGTITWGAAQAVQPFGNILQVVEITGRDLYKALNEQYDQKQNFFLQIAGLRYTYTDNKEGGEETPFKVVKAYKSNGEEINPDAKYKLVINDFLFGGGDGFASFRNAKLLGAINPDTEVFMAYITDLEKAGKKVSVPNNKPKIYVTMKMVNETITQNDGTYSIIEKLYLDRQGNIVAQEIVSDTLNQTKSKSTKINPVTTIHKKQLHQFTAINPMRNYGKPSNSTTVKSK

SEQ ID NO: 980 - DNA, 1500 bp, Streptococcus agalactiae
atgaataaacgcgtaaaaatcgttgcaacacttggtcctgcggttgaattccgtggtggtaagaagtttggtgagtctggatactggggtgaaagccttgacgtagaagcttcagcagaaaaaattgctcaattgattaaagaaggtgctaacgttttccgtttcaacttctcacatggagatcatgctgagcaaggagctcgtatggctactgttcgtaaagcagaagagattgcaggacaaaaagttggcttcctccttgatactaaaggacctgaaattcgtacagaactttttgaagatggtgcagatttccattcatatacaacaggtacaaaattacgtgttgctactaagcaaggtatcaaatcaactccagaagtgattgcattgaatgttgctggtggacttgacatctttgatgacgttgaagttggtaagcaaatccttgttgatgatggtaaactaggtcttactgtgtttgcaaaagataaagacactcgtgaatttgaagtagttgttgagaatgatggccttattggtaaacaaaaaggtgtaaacatcccttatactaaaattcctttcccagcacttgcagaacgcgataatgctgatatccgttttggacttgagcaaggacttaactttattgctatctcatttgtacgtactgctaaagatgttaatgaagttcgtgctatttgtgaagaaactggsmatggacacgttaagttgtttgctaaaattgaaaatcaacaaggtatcgataatattgatgagattatcgaagcagcagatggtattatgattgctcgtggtgatatgggtatcgaagttccatttgaaatggttccagtttaccaaaaaatgatcattactaaagttaatgcagctggtaaagcagttattacagcaacaaatatgcttgaaacaatgactgataaaccacgtgcgactcgttcagaagtatctgatgtcttcaatgctgttattgatggtactgatgctacaatgctttcaggtgagtcagctaatggtaaatacccagttgagtcagttcgtacaatggctactattgataaaaatgctcaaacattactcaatgagtatggtcgcttagactcatctgcattcccacgtaataacaaaactgatgttattgcatctgcggttaaagatgcaacacactcaatggatatcaaacttgttgtaacaattactgaaacaggtaatacagctcgtgccatttctaaattccgtccagatgcagacattttggctgttacatttgatgaaaaagtacaacgttcattgatgattaactggggtgttatccctgtccttgcagacaaaccagcatctacagatgatatgtttgaggttgcagaacgtgtagcacttgaagcaggatttgttgaatcaggcgataatatcgttatcgttgcaggtgttcctgtaggtacaggtggaactaacacaatgcgtgttcgtactgttaaa

SEQ ID NO: 981 - DNA, 1497 bp, Streptococcus agalactiae
aataaacgcgtaaaaatcgttgcaacacttggtcctgcggtagaattccgtggtggtaagaagtttggtgagtctggatactggggtgaaagccttgacgtagaagcttcagcagaaaaaattgctcaattgattaaagaaggtgctaacgttttccgtttcaacttctcacatggagatcatgctgagcaaggagctcgtatggctactgttcgtaaagcagaagagattgcaggacaaaaagttggcttcctccttgatactaaaggacctgaaattcgtacagaactttttgaagatggttcagatttccattcatatacaacaggtacagaattacgtgttgctactaagcaaggtatcaaatcaactccagaagtgattgcattgaatgttgctggtggacttgacatctttgatgacgttgaagttggtaagcaaatccttgttgatgatggtaaactaggtcttactgtgtttgcaaaagataaagacactcgtgaatttgaagtagttgttgagaatgatggccttattggtaaacaaaaaggtgtaaacatcccttatactaaaattcctttcccagcacttgcagaacgcgataatgctgatatccgttttggacttgagcaaggacttaactttattgctatctcatttgtacgtactgctaaagatgttaatgaagttcgtgctatttgtgaagaaactggcaatggacatgttaagttgtttgctaaaattgaaaatcaacaaggtatcgataatattgatgagattatcgaagcagcagatggtattatgattgctcgtggtgatatgggtatcgaagttccatttgaaatggttccagtttaccaaaaaatgatcattactaaagttaatgcagctggtaaagcagttattacagcaacaaatatgcttgaaacaatgactgataaaccacgtgcgactcgttcagaagtatctgatgtcttcaatgctgttattgatggtactgatgctacaatgctttcaggtgagtcagctaatggtaaatacccagttgagtcagttcgtacaatggctactattgataaaaatgctcaaacattactcaatgagtatggtcgcttagactcatctgcattcccacgtaataacaaaactgatgttattgcatctgcggttaaagatgcaacacactcaatggatatcaaacttgttgtgacaattactgaaacaggtaatacagctcgtgccatttctaaattccgtccagatgcagacattttggctgttacatttgatgaaaaagtacaacgttcattgatgattaactggggtgttatccctgtccttgcagacaaaccagcatctacagatgatatgtttgaggttgcagaacgtgtagcacttgaagcaggacttgttgaatcaggcgataatatcgttatcgttgcaggtgttcctgtaggtacaggtggaactaacacaatgcgtgttcgtactgttaaa

SEQ ID NO: 982 - DNA, 1497 bp, Streptococcus agalactiae
aataaacgcgtaaaaatcgttgcaacacttggtcctgcggttgaattccgtggtggtaagaagtttggtgagtctggatactggggtgaaagccttgacgtagaagcttcagcagaaaaaattgctcaattgattaaagaaggtgctaacgttttccgtttcaacttctcacatggagatcatgctgagcaaggagctcgtatggctactgttcgtaaagcagaagagattgcaggacaaaaagttggcttcctccttgatactaaaggacctgaaattcgtacagaactttttgaagatggtgcagatttccattcatatacaacaggtacaaaattacgtgttgctactaagcaaggtatcaaatcaactccagaagtgattgcattgaatgttgctggtggacttgacatctttgatgacgttgaagttggtaagcaaatccttgttgatgatggtaaactaggtcttactgtgtttgcaaaagataaagacactcgtgaatttgaagtagttgttgagaatgatggccttattggtaaacaaaaaggtgtaaacatcccttatactaaaattcctttcccagcacttgcagaacgcgataatgctgatatccgttttggacttgagcaaggacttaactttattgctatctcatttgtacgtactgctaaagatgttaatgaagttcgtgctatttgtgaagaaactggcaatggacacgttaagttgtttgctaaaattgaaaatcaacaaggtatcgataatattgatgagattatcgaagcagcagatggtattatgattgctcgtggtgatatgggtatcgaagttccatttgaaatggttccagtttaccaaaaaatgatcattactaaagttaatgcagctggtaaagcagttattacagcaacaaatatgcttgaaacaatgactgataaaccacgtgcgactcgttcagaagtatctgatgtcttcaatgctgttattgatggtactgatgctacaatgctttcaggtgagtcagctaatggtaaatacccagttgagtcagttcgtacaatggctactattgataaaaatgctcaaacattactcaatgagtatggtcgcttagactcatctgcattcccacgtaataacaaaactgatgttattgcatctgcggttaaagatgcaacacactcaatggatatcaaacttgttgtaacaattactgaaacaggtaatacagctcgtgccatttctaaattccgtccagatgcagacattttggctgttacatttgatgaaaaagtacaacgttcattgatgattaactggggtgttatccctgtccttgcagacaaaccagcatctacagatgatatgtttgaggttgcagaacgtgtagcacttgaagcaggatttgttgaatcaggcgataatatcgttatcgttgcaggtgttcctgtaggtacaggtggaactaacacaatgcgtgttcgtactgttaaa

SEQ ID NO: 983 - DNA, 1497 bp, Streptococcus agalactiae; identical to SEQ ID NO: 982

SEQ ID NO: 984 - DNA, 1497 bp, Streptococcus agalactiae; identical to SEQ ID NO: 982

SEQ ID NO: 985 - DNA, 1497 bp, Streptococcus agalactiae
aataaacgcgtaaaaatcgttgcaacacttggtcctgcggtagaattccgtggtggtaagaagtttggtgagtctggatactggggtgaaagccttgacgtagaagcttcagcagaaaaaattgctcaattgattaaagaaggtgctaacgttttccgtttcaacttctcacatggagatcatgctgagcaaggagctcgtatggctactgttcgtaaagcagaagagattgcaggacaaaaagttggcttcctccttgatactaaaggacctgaaattcgtacagaactttttgaagatggtgcagatttccattcatatacaacaggtacaaaattacgtgttgctactaagcaaggtatcaaatcaactccagaagtgattgcattgaatgttgctggtggacttgacatctttgatgacgttgaagttggtaagcaaatccttgttgatgatggtaaactaggtcttactgtgtttgcaaaagataaagacactcgtgaatttgaagtagttgttgagaatgatggccttattggtaaacaaaaaggtgtaaacatcccttatactaaaattcctttcccagcacttgcagaacgcgataatgctgatatccgttttggacttgagcaaggacttaactttattgctatctcatttgtacgtactgctaaagatgttaatgaagttcgtgctatttgtgaagaaactggcaatggacacgttaagttgtttgctaaaattgaaaatcaacaaggtatcgataatattgatgagattatcgaagcagcagatggtattatgattgctcgtggtgatatgggtatcgaagttccatttgaaatggttccagtttaccaaaaaatgatcattactaaagttaatgcagctggtaaagcagttattacagcaacaaatatgcttgaaacaatgactgataaaccacgtgcgactcgttcagaagtatctgatgtcttcaatgctgttattgatggtactgatgctacaatgctttcaggtgagtcagctaatggtaaatacccagttgagtcagttcgtacaatggctactattgataaaaatgctcaaacattactcaatgagtatggtcgcttagactcatctgcattcccacgtaataacaaaactgatgttattgcatctgcggttaaagatgcaacacactcaatggatatcaaacttgttgtaacaattactgaaacaggtaatacagctcgtgccatttctaaattccgtccagatgcagacattttggctgttacatttgatgaaaaagtacaacgttcattgatgattaactggggtgttatccctgtccttgcagacaaaccagcatctacagatgatatgtttgaggttgcagaacgtgtagcacttgaagcaggacttgttgaatcaggcgataatatcgttatcgttgcaggtgttcctgtaggtacaggtggaactaacacaatgcgtgttcgtactgttaaa

SEQ ID NO: 986 - DNA, 1497 bp, Streptococcus agalactiae; identical to SEQ ID NO: 985

SEQ ID NO: 987 - DNA, 1497 bp, Streptococcus agalactiae
aataaacgcgtaaaaatcgttgcaacacttggtcctgcggtagaattccgtggtggtaagaagtttggtgagtctggatactggggtgaaagccttgacgtagaagcttcagcagaaaaaattgctcaattgattaaagaaggtgctaacgttttccgtttcaacttctcacatggagatcatgctgagcaaggagctcgtatggctactgttcgtaaagcagaagagattgcaggacaaaaagttggcttcctccttgatactaaaggacctgaaattcgtacagaactttttgaagatggtgcagatttccattcatatacaacaggtacaaaattacgtgttgctactaagcaaggtatcaaatcaactccagaagtgattgcattgaatgttgctggtggacttgacatctttgatgacgttgaagttggtaagcaaatccttgttgatgatggtaaactaggtcttactgtgtttgcaaaagataaagacactcgtgaatttgaagtagttgttgagaatgatggccttattggtaaacaaaaaggtgtaaacatcccttatactaaaattcctttcccagcacttgcagaacgcgataatgctgatatccgttttggacttgagcaaggacttaactttattgctatctcatttgtacgtactgctaaagatgttaatgaagttcgtgctatttgtgaagaaactggcaatggacacgttaagttgtttgctaaaattgaaaatcaacaaggtatcgataatattgatgagattatcgaagcagcagatggtattatgattgctcgtggtgatatgggtatcgaagttccatttgaaatggttccagtttaccaaaaaatgatcattactaaagttaatgcagctggtaaagcagttattacagcaacaaatatgcttgaaacaatgactgataaaccacgtgcgactcgttcagaagtatctgatgtcttcaatgctgttattgatggtactgatgctacaatgctttcaggtgagtcagctaatggtaaatacccagttgagtcagttcgtacaatggctactattgataaaaatgctcaaacattactcaatgagtatggtcgcttagactcatctgcattcccacgtaataacaaaactgatgttattgcatctgcggttaaagatgcaacacactcaatggatatcaaacttgttgtaacaattactgaaacaggtaatacagctcgtgccatttctaagttccgtccagatgcagacattttggctgttacatttgatgaaaaagtacaacgttcattgatgattaactggggtgttatccctgtccttgcagacaaaccagcatctacagatgatatgtttgaggttgcagaacgtgtagcacttgaagcaggacttgttgaatcaggcgataatatcgttatcgttgcaggtgttcctgtaggtacaggtggaactaacacaatgcgtgttcgtactgttaaa

SEQ ID NO: 988 - DNA, 1497 bp, Streptococcus agalactiae
aataaacgcgtaaaaatcgttgcaacacttggtcctgcggttgaattccgtggtggtaagaagtttggtgagtctggatactggggtgaaagccttgacgtagaagcttcagcagaaaaaattgctcaattgattaaagaaggtgctaacgttttccgtttcaacttctcacatggagatcatgctgagcaaggagctcgtatggctactgttcgtaaagcagaagagattgcaggacaaaaagttggcttcctccttgatactaaaggacctgaaattcgtacagaactttttgaagatggtgcagatttccattcatatacaacaggtacaaaattacgtgttgctactaagcaaggtatcaaatcaactccagaagtgattgcattgaatgttgctggtggacttgacatctttgatgacgttgaagttggtaagcaaatccttgttgatgatggtaaactaggtcttactgtgtttgcaaaagataaagacactcgtgaatttgaagtagttgttgagaatgatggccttattggtaaacaaaaaggtgtaaacatcccttatactaaaattcctttcccagcacttgcagaacgcgataatgctgatatccgttttggacttgaacaaggacttaactttattgctatctcatttgtacgtactgctaaagatgttaatgaagttcgtgctatttgtgaagaaactggcaatggacacgttaagttgtttgctaaaattgaaaatcaacaaggtatcgataatattgatgagattatcgaagcagcagatggtattatgattgctcgtggtgatatgggtatcgaagttccatttgaaatggttccagtttaccaaaaaatgatcattactaaagttaatgcagctggtaaagcagttattacagcaacaaatatgcttgaaacaatgactgataaaccacgtgcgactcgttcagaagtatctgatgtcttcaatgctgttattgatggtactgatgctacaatgctttcaggtgagtcagctaatggtaaatacccagttgagtcagttcgtacaatggctactattgataaaaatgctcaaacattactcaatgagtatggtcgcttagactcatctgcattcccacgtaataacaaaactgatgttattgcatctgcggttaaagatgcaacacactcaatggatatcaaacttgttgtaacaattactgaaacaggtaatacagctcgtgccatttctaaattccgtccagatgcagacattttggctgttacatttgatgaaaaagtacaacgttcattgatgattaactggggtgttatccctgtccttgcagacaaaccagcatctacagatgatatgtttgaggttgcagaacgtgtagcacttgaagcaggatttgttgaatcaggcgataatatcgttatcgttgcaggtgttcctgtaggtacaggtggaactaacacaatgcgtgttcgtactgttaaa

SEQ ID NO: 989 - DNA, 1497 bp, Streptococcus agalactiae
aataaacgcgtaaaaatcgttgcaacacttggtcctgcggtagaattccgtggtggtaagaagtttggtgagtctggatactggggtgaaagccttgacgtagaagcttcagcagaaaaaattgctcaattgattaaagaaggtgctaacgttttccgtttcaacttctcacatggagatcatgctgagcaaggagctcgtatggctactgttcgtaaagcagaagagattgcaggacaaaaagttggcttcctccttgatactaaaggacctgaaattcgtacagaactttttgaagatggtgcagatttccattcatatacaacaggtacaaaattacgtgttgctactaagcaaggtatcaaatcaactccagaagtgattgcattgaatgttgctggtggacttgacatctttgatgacgttgaagttggtaagcaaatccttgttgatgatggtaaactaggtcttactgtgtttgcaaaagataaagacactcgtgaatttgaagtagttgttgagaatgatggccttattggtaaacaaaaaggtgtaaacatcccttatactaaaattcctttcccagcacttgcagaacgcgataatgctgatatccgttttggacttgagcaaggacttaactttattgctatctcatttgtacgtactgctaaagatgttaatgaagttcgtgctatttgtgaagaaactggcaatggacacgttaagttgtttgctaaaattgaaaatcaacaaggtatcgataatattgatgagattatcgaagcagcagatggtattatgattgctcgtggtgatatgggtatcgaagttccatttgaaatggttccagtttaccaaaaaatgatcattactaaagttaatgcagctggtaaagcagttattacagcaacaaatatgcttgaaacaatgactgataaaccacgtgcgactcgttcagaagtatctgatgtcttcaatgctgttattgatggtactgatgctacaatgctttcaggtgagtcagctaatggtaaatacccagttgagtcagttcgtacaatggctactattgataaaaatgctcaaacattactcaatgagtatggtcgtttagactcatctgcattcccacgtaataacaaaactgatgttattgcatctgcggttaaagatgcaacacactcaatggatatcaaacttgttgtaacaattactgaaacaggtaatacagctcgtgccatttctaaattccgtccagatgcagacattttggctgttacatttgatgaaaaagtacaacgttcattgatgattaactggggtgttatccctgtccttgcagacaaaccagcatctacagatgatatgtttgaggttgcagaacgtgtagcacttgaagcaggacttgttgaatcaggcgataatatcgttatcgttgcaggtgttcctgtaggtacaggtggaactaacacaatgcgtgttcgtactgttaaa

SEQ ID NO: 990 - DNA, 1497 bp, Streptococcus agalactiae
aataaacgcgtaaaaatcgttgcaacacttggtcctgcggtagaattccgtggtggtaagaagtttggtgagtctggatactggggtgaaagccttgacgtagaagcttcagcagaaaaaattgctcaattgattaaagaaggtgctaacgttttccgtttcaacttctcacatggagatcatgctgagcaaggagctcgtatggctactgttcgtaaagcagaagagattgcaggacaaaaagttggcttcctccttgatactaaaggacctgaaattcgtacagaactttttgaagatggttcagatttccattcatatacaacaggtacaaaattacgtgttgctactaagcaaggtatcaaatcaactccagaagtgattgcattgaatgttgctggtggacttgacatctttgatgacgttgaagttggtaagcaaatccttgttgatgatggtaaactaggtcttactgtgtttgcaaaagataaagacactcgtgaatttgaagtagttgttgagaatgatggccttattggtaaacaaaaaggtgtaaacatcccttatactaaaattcctttcccagcacttgcagaacgcgataatgctgatatccgttttggacttgagcaaggacttaactttattgctatctcatttgtacgtactgctaaagatgttaatgaagttcgtgctatttgtgaagaaactggcaatggacatgttaagttgtttgctaaaattgaaaatcaacaaggtatcgataatattgatgagattatcgaagcagcagatggtattatgattgctcgtggtgatatgggtatcgaagttccatttgaaatggttccagtttaccaaaaaatgatcattactaaagttaatgcagctggtaaagcagttattacagcaacaaatatgcttgaaacaatgactgataaaccacgtgcgactcgttcagaagtatctgatgtcttcaatgctgttattgatggtactgatgctacaatgctttcaggtgagtcagctaatggtaaatacccagttgagtcagttcgtacaatggctactattgataaaaatgctcaaacattactcaatgagtatggtcgcttagactcatctgcattcccacgtaataacaaaactgatgttattgcatctgcggttaaagatgcaacacactcaatggatatcaaacttgttgtgacaattactgaaacaggtaatacagctcgtgccatttctaaattccgtccagatgcagacattttggctgttacatttgatgaaaaagtacaacgttcattgatgattaactggggtgttatccctgtccttgcagacaaaccagcatctacagatgatatgtttgaggttgcagaacgtgtagcacttgaagcaggacttgttgaatcaggcgataatatcgttatcgttgcaggtgttcctgtaggtacaggtggaactaacacaatgcgtgttcgtactgttaaa

SEQ ID NO: 991 - protein, 500 aa, Streptococcus agalactiae
  VARIANT 240: Xaa = Any Amino Acid
MNKRVKIVATLGPAVEFRGGKKFGESGYWGESLDVEASAEKIAQLIKEGANVFRFNFSHGDHAEQGARMATVRKAEEIAGQKVGFLLDTKGPEIRTELFEDGADFHSYTTGTKLRVATKQGIKSTPEVIALNVAGGLDIFDDVEVGKQILVDDGKLGLTVFAKDKDTREFEVVVENDGLIGKQKGVNIPYTKIPFPALAERDNADIRFGLEQGLNFIAISFVRTAKDVNEVRAICEETGXGHVKLFAKIENQQGIDNIDEIIEAADGIMIARGDMGIEVPFEMVPVYQKMIITKVNAAGKAVITATNMLETMTDKPRATRSEVSDVFNAVIDGTDATMLSGESANGKYPVESVRTMATIDKNAQTLLNEYGRLDSSAFPRNNKTDVIASAVKDATHSMDIKLVVTITETGNTARAISKFRPDADILAVTFDEKVQRSLMINWGVIPVLADKPASTDDMFEVAERVALEAGFVESGDNIVIVAGVPVGTGGTNTMRVRTVK

SEQ ID NO: 992 - protein, 499 aa, Streptococcus agalactiae
NKRVKIVATLGPAVEFRGGKKFGESGYWGESLDVEASAEKIAQLIKEGANVFRFNFSHGDHAEQGARMATVRKAEEIAGQKVGFLLDTKGPEIRTELFEDGSDFHSYTTGTELRVATKQGIKSTPEVIALNVAGGLDIFDDVEVGKQILVDDGKLGLTVFAKDKDTREFEVVVENDGLIGKQKGVNIPYTKIPFPALAERDNADIRFGLEQGLNFIAISFVRTAKDVNEVRAICEETGNGHVKLFAKIENQQGIDNIDEIIEAADGIMIARGDMGIEVPFEMVPVYQKMIITKVNAAGKAVITATNMLETMTDKPRATRSEVSDVFNAVIDGTDATMLSGESANGKYPVESVRTMATIDKNAQTLLNEYGRLDSSAFPRNNKTDVIASAVKDATHSMDIKLVVTITETGNTARAISKFRPDADILAVTFDEKVQRSLMINWGVIPVLADKPASTDDMFEVAERVALEAGLVESGDNIVIVAGVPVGTGGTNTMRVRTVK

SEQ ID NO: 993 - protein, 499 aa, Streptococcus agalactiae
NKRVKIVATLGPAVEFRGGKKFGESGYWGESLDVEASAEKIAQLIKEGANVFRFNFSHGDHAEQGARMATVRKAEEIAGQKVGFLLDTKGPEIRTELFEDGADFHSYTTGTKLRVATKQGIKSTPEVIALNVAGGLDIFDDVEVGKQILVDDGKLGLTVFAKDKDTREFEVVVENDGLIGKQKGVNIPYTKIPFPALAERDNADIRFGLEQGLNFIAISFVRTAKDVNEVRAICEETGNGHVKLFAKIENQQGIDNIDEIIEAADGIMIARGDMGIEVPFEMVPVYQKMIITKVNAAGKAVITATNMLETMTDKPRATRSEVSDVFNAVIDGTDATMLSGESANGKYPVESVRTMATIDKNAQTLLNEYGRLDSSAFPRNNKTDVIASAVKDATHSMDIKLVVTITETGNTARAISKFRPDADILAVTFDEKVQRSLMINWGVIPVLADKPASTDDMFEVAERVALEAGFVESGDNIVIVAGVPVGTGGTNTMRVRTVK

SEQ ID NO: 994 - protein, 499 aa, Streptococcus agalactiae; identical to SEQ ID NO: 993

SEQ ID NO: 995 - protein, 499 aa, Streptococcus agalactiae; identical to SEQ ID NO: 993

SEQ ID NO: 996 - protein, 499 aa, Streptococcus agalactiae
NKRVKIVATLGPAVEFRGGKKFGESGYWGESLDVEASAEKIAQLIKEGANVFRFNFSHGDHAEQGARMATVRKAEEIAGQKVGFLLDTKGPEIRTELFEDGADFHSYTTGTKLRVATKQGIKSTPEVIALNVAGGLDIFDDVEVGKQILVDDGKLGLTVFAKDKDTREFEVVVENDGLIGKQKGVNIPYTKIPFPALAERDNADIRFGLEQGLNFIAISFVRTAKDVNEVRAICEETGNGHVKLFAKIENQQGIDNIDEIIEAADGIMIARGDMGIEVPFEMVPVYQKMIITKVNAAGKAVITATNMLETMTDKPRATRSEVSDVFNAVIDGTDATMLSGESANGKYPVESVRTMATIDKNAQTLLNEYGRLDSSAFPRNNKTDVIASAVKDATHSMDIKLVVTITETGNTARAISKFRPDADILAVTFDEKVQRSLMINWGVIPVLADKPASTDDMFEVAERVALEAGLVESGDNIVIVAGVPVGTGGTNTMRVRTVK

SEQ ID NO: 997 - protein, 499 aa, Streptococcus agalactiae; identical to SEQ ID NO: 996

SEQ ID NO: 998 - protein, 499 aa, Streptococcus agalactiae; identical to SEQ ID NO: 996

SEQ ID NO: 999 - protein, 499 aa, Streptococcus agalactiae; identical to SEQ ID NO: 993

SEQ ID NO: 1000 - protein, 499 aa, Streptococcus agalactiae; identical to SEQ ID NO: 996

SEQ ID NO: 1001 - protein, 499 aa, Streptococcus agalactiae
NKRVKIVATLGPAVEFRGGKKFGESGYWGESLDVEASAEKIAQLIKEGANVFRFNFSHGDHAEQGARMATVRKAEEIAGQKVGFLLDTKGPEIRTELFEDGSDFHSYTTGTKLRVATKQGIKSTPEVIALNVAGGLDIFDDVEVGKQILVDDGKLGLTVFAKDKDTREFEVVVENDGLIGKQKGVNIPYTKIPFPALAERDNADIRFGLEQGLNFIAISFVRTAKDVNEVRAICEETGNGHVKLFAKIENQQGIDNIDEIIEAADGIMIARGDMGIEVPFEMVPVYQKMIITKVNAAGKAVITATNMLETMTDKPRATRSEVSDVFNAVIDGTDATMLSGESANGKYPVESVRTMATIDKNAQTLLNEYGRLDSSAFPRNNKTDVIASAVKDATHSMDIKLVVTITETGNTARAISKFRPDADILAVTFDEKVQRSLMINWGVIPVLADKPASTDDMFEVAERVALEAGLVESGDNIVIVAGVPVGTGGTNTMRVRTVK

SEQ ID NO: 1002 - DNA, 720 bp, Streptococcus agalactiae
ttgtctgctataatagacaaaaaggtggtgatatttatgtatttagcattaatcggtgatatcattaattcaaaacagatacttgaacgtgaaactttccaacagtcttttcagcaactaatgaccgaactatctgatgtatatggtgaagagctgatttctccattcactattacagctggtgatgaatttcaagctttattgaaaccatcaaaaaaggtatttcaaattattgaccatattcaactagctctaaaacctgttaatgtaaggttcggcctcggtacaggaaacattataacatccatcaattcaaatgaaagtatcggtgctgatggtcctgcctactggcatgctcgctcagctattaatcatatacatgataaaaatgattatggaacagttcaagtagctatttgccttgatgatgaagaccaaaaccttgaattaacactaaatagtctcatttcagctggtgattttatcaagtcaaaatggactacaaaccattttcaaatgcttgagcacttaatacttcaagataattatcaagaacaatttcaacatcaaaagttagcccaactggaaaatattgaacctagtgcgctgactaaacgccttaaagcaagcggtctgaagatttacttaagaacgagaacacaggcagccgatctattagttaaaagttgcactcaaactaaagggggaagctatgatttc

SEQ ID NO: 1003 - DNA, 717 bp, Streptococcus agalactiae
tctgctataatagacaaaaaggtggtgatatttatgtatttagcattaatcggtgatatcattaattcaaaacagatacttgaacgtgaaactttccaacagtcttttcagcaactaatgaccgaactatctgatgtatatggtgaagagctgatttctccattcactattacagctggtgatgaatttcaagctttattgaaaccatcaaaaaaggtatttcaaattattgaccatattcaactagctctaaaacctgttaatgtaaggttcggcctcggtacaggaaacattataacatccatcaatttaaatgaaagtatcggtgctgatggtcctgcctactggcatgctcgctcagctattaatcatatacatgataaaaatgattatggaacagttcaagtagctatttgccttgatgatgaagaccaaaaccttgaattaacactaaatagtctcatttcagctggtgattttatcaagtcaaaatggactacaaaccattttcaaatgcttgagcacttaatacttcaagataattatcaagaacaatttcaacatcaaaagttagcccaactggaaaatattgaacctagtgcgctgactaaacgccttaaagcaagcggtctgaagatttacttaagaacgagaacacaggcagccgatctattagttaaaagttgcactcaaactaaagggggaagctatgatttc

SEQ ID NO: 1004 - DNA, 717 bp, Streptococcus agalactiae
tctgctataatagacaaaaaggtggtgatatttatgtatttagcattaatcggtgatatcattaattcaaaacagatacttgaacgtgaaactttccaacagtcttttcagcaactaatgaccgaactatctgatgtatatggtgaagagctgatttctccattcactattacagctggtgatgaatttcaagctttattgaaaccatcaaaaaaggtatttcaaattattgaccatattcaactagctctaaaacctgttaatgtaaggttcggcctcggtacaggaaacattataacatccatcaattcaaatgaaagtatcggtgctgatggtcctgcctactggcatgctcgctcagctattaatcatatacatgataaaaatgattatggaacagttcaagtagctatttgccttgatgatgaagaccaaaaccttgaattaacactaaatagtctcatttcagctggtgattttatcaagtcaaaatggactacaaaccattttcaaatgcttgagcacttaatacttcaagataattatcaagaacaatttcaacatcaaaagttagcccaactggaaaatattgaacctagtgcgctgactaaacgccttaaagcaagcggtctgaagatttacttaagaacgagaacacaggcagccgatctattagttaaaagttgcactcaaactaaagggggaagctatgatttc

SEQ ID NO: 1005 - DNA, 717 bp, Streptococcus agalactiae; identical to SEQ ID NO: 1004

SEQ ID NO: 1006 - DNA, 717 bp, Streptococcus agalactiae; identical to SEQ ID NO: 1004

SEQ ID NO: 1007 - DNA, 717 bp, Streptococcus agalactiae
tctgctataatagacaaaaaggtggtgatatttatgtatttagcattaatcggtgatatcattaattcaaaacagatacttgaacgtgaaactttccaacagtcttttcagcaactaatgaccgaactatctgatgtatatggtgaagagctgatttctccattcactattacagctggtgatgaatttcaagctttattgaaacaatcaaaaaaggtatttcaaattattgaccatattcaactagctctaaaacctgttaatgtaaggttcggcctcggtacaggaaacattataacatccatcaattcaaatgaaagtatcggtgctgatggtcctgcctactggcatgctcgctcagctattaatcatatacatgataaaaatgattatggaacagttcaagtagctatttgccttgatgatgaagaccaaaaccttgaattaacactaaatagtctcatttcagctggtgattttatcaagtcaaaatggactacaaaccattttcaaatgcttgagcacttaatacttcaagataattatcaagaacaatttcaacatcaaaagttagcccaactggaaaatattgaacctagtgcgctgactaaacgccttaaagcaagcggtctgaagatttacttaagaacgagaacacaggcagccgatctattagttaaaagttgcactcaaactaaagggggaagctatgatttc

SEQ ID NO: 1008 - DNA, 717 bp, Streptococcus agalactiae; identical to SEQ ID NO: 1007

SEQ ID NO: 1009 - DNA, 717 bp, Streptococcus agalactiae; identical to SEQ ID NO: 1007

SEQ ID NO: 1010 - DNA, 717 bp, Streptococcus agalactiae
tctgctataatagacaaaaaggtggtggtatttatgtatttagcattaatcggtgatatcattaattcaaaacagatacttgaacgtgaaactttccaacagtcttttcagcaactaatgaccgaactatctgatgtatatggtgaagagctgatttctctattcactattacagctggtgatgaatttcaagctttattgaaaccatcaaaaaaggtatttcaaattattgaccatattcaactagctctaaaacctgttaatgtaaggttcggcctcggtacaggaaacattataacatccatcaattcaaatgaaagtatcggtgctgatggtcctgcctactggcatgctcgctcagctattaatcatatacatgataaaaatgattatggaacagttcaagtagctatttgccttgatgatgaagaccaaaaccttgaattaacactaaatagtctcatttcagctggtgattttatcaagtcaaaatggactactaaccattttcaaatgcttgagcacttaatacttcaagataattatcaagaacaatttcaacatcaaaagttagcccaactggaaaatattgaacctagtgcgctgactaaacgccttaaagcaagcggtctgaagatttacttaagaacgagaacacaggcagccgatctattagttaaaagttgcactcaaactaaagggggaagctatgatttc

SEQ ID NO: 1011 - DNA, 717 bp, Streptococcus agalactiae; identical to SEQ ID NO: 1004

SEQ ID NO: 1012 - protein, 240 aa, Streptococcus agalactiae
LSAIIDKKVVIFMYLALIGDIINSKQILERETFQQSFQQLMTELSDVYGEELISPFTITAGDEFQALLKPSKKVFQIIDHIQLALKPVNVRFGLGTGNIITSINSNESIGADGPAYWHARSAINHIHDKNDYGTVQVAICLDDEDQNLELTLNSLISAGDFIKSKWTTNHFQMLEHLILQDNYQEQFQHQKLAQLENIEPSALTKRLKASGLKIYLRTRTQAADLLVKSCTQTKGGSYDF

SEQ ID NO: 1013 - protein, 239 aa, Streptococcus agalactiae
SAIIDKKVVIFMYLALIGDIINSKQILERETFQQSFQQLMTELSDVYGEELISPFTITAGDEFQALLKPSKKVFQIIDHIQLALKPVNVRFGLGTGNIITSINLNESIGADGPAYWHARSAINHIHDKNDYGTVQVAICLDDEDQNLELTLNSLISAGDFIKSKWTTNHFQMLEHLILQDNYQEQFQHQKLAQLENIEPSALTKRLKASGLKIYLRTRTQAADLLVKSCTQTKGGSYDF

SEQ ID NO: 1014 - protein, 239 aa, Streptococcus agalactiae
SAIIDKKVVIFMYLALIGDIINSKQILERETFQQSFQQLMTELSDVYGEELISPFTITAGDEFQALLKPSKKVFQIIDHIQLALKPVNVRFGLGTGNIITSINSNESIGADGPAYWHARSAINHIHDKNDYGTVQVAICLDDEDQNLELTLNSLISAGDFIKSKWTTNHFQMLEHLILQDNYQEQFQHQKLAQLENIEPSALTKRLKASGLKIYLRTRTQAADLLVKSCTQTKGGSYDF

SEQ ID NO: 1015 - protein, 239 aa, Streptococcus agalactiae; identical to SEQ ID NO: 1014

SEQ ID NO: 1016 - protein, 239 aa, Streptococcus agalactiae; identical to SEQ ID NO: 1014

SEQ ID NO: 1017 - protein, 239 aa, Streptococcus agalactiae
SAIIDKKVVIFMYLALIGDIINSKQILERETFQQSFQQLMTELSDVYGEELISPFTITAGDEFQALLKQSKKVFQIIDHIQLALKPVNVRFGLGTGNIITSINSNESIGADGPAYWHARSAINHIHDKNDYGTVQVAICLDDEDQNLELTLNSLISAGDFIKSKWTTNHFQMLEHLILQDNYQEQFQHQKLAQLENIEPSALTKRLKASGLKIYLRTRTQAADLLVKSCTQTKGGSYDF

SEQ ID NO: 1018 - protein, 239 aa, Streptococcus agalactiae; identical to SEQ ID NO: 1017

SEQ ID NO: 1019 - protein, 239 aa, Streptococcus agalactiae; identical to SEQ ID NO: 1017

SEQ ID NO: 1020 - protein, 239 aa, Streptococcus agalactiae
SAIIDKKVVVFMYLALIGDIINSKQILERETFQQSFQQLMTELSDVYGEELISLFTITAGDEFQALLKPSKKVFQIIDHIQLALKPVNVRFGLGTGNIITSINSNESIGADGPAYWHARSAINHIHDKNDYGTVQVAICLDDEDQNLELTLNSLISAGDFIKSKWTTNHFQMLEHLILQDNYQEQFQHQKLAQLENIEPSALTKRLKASGLKIYLRTRTQAADLLVKSCTQTKGGSYDF

SEQ ID NO: 1021 - protein, 239 aa, Streptococcus agalactiae; identical to SEQ ID NO: 1014

SEQ ID NO: 1022 - DNA, 867 bp, Streptococcus agalactiae
atggaaatgcaagttcaaaaaagttttaaatcaaatatacattacggaacactctatctagtcccaactccaattggtaatctagatgatatgacttttcgtgccattaggattttaagagaagttgattttatttgtgcagaggatacacgaaatacgggacttttactcaagcactttgatattactactaaacaaattagttttcacgaacacaatgcttacgataaaatctctgggttaattgatttgttaaaagaagggaaatctttagcccaagtatctgatgcaggaatgccctctatttctgacccaggacatgaccttgtcaaggctgctattgaaggggatatcccagttgtatctataccaggagctagcgctggtattactgctctcatcgcttcaggtttagctccacaacctcatattttttatggcttcttacctcgtaagaaaggtcaacaaataactttctttgaaacaaagcaagattaccctgaaacacaaatcttttatgagtcaccgtttcgagtctctgatacgctaaaacacatgaaagagatttacggagatcgccaagttgttttagtacgcgaattgacgaaactctatgaagagtatcaaagaggaaccattagtcaacttttagagcatattgaaaaggtccctctcaaaggtgaatgcttaattattgttgatggtaagagagataccgagcgagtgaaagacagtagccaacaagatccactagtattagtaaaagaatatatcgctaatggtgataaaactaatcaagcgataaaaaaagtagcaaaagaatttaatctcaatagacaagaactctatgctagtttccatgattta

SEQ ID NO: 1023 - DNA, 760 bp, Streptococcus agalactiae
gaaatgcaagttcaaaaaagttttaaatcaaatacacattacgggacactctatctagtcccaactccaattggtaatctagatgatatgacttttcgtgccattaggattttaagagaagttgattttatttgtgcagaggatacacgaaatacgggacttttactcaagcactttgatattactactaaacaaattagttttcacgaacacaatgcttacgataaaatctctgggttaattgatttgttaaaagaagggagatctttagcccaagtatctgatgcaggaatgccctctatttctgacccaggacatgaccttgtcaaggctgctattgaaggggggatcccggtcgtatctataccaggagctagcgctggtattactgctctcatcgcttcaggtttagctccacaacctcatattttttatggcttcttaccgcgtaagaaaggtcaacaaataactttttttgaaacaaagaaagattaccctgaaacacaaatcttttatgagtcaccgtttcgagtctctgatacgctaaaacacatgaaagagatttacggagatcgccaagttgttttagtacgcgaattgacgaaactctatgaagagtatcaaagaggaaccattagtcaacttttagggcatattgaaaaagtccctctcaaaggtgaatgcttaattattgttgatggtaagagagataccgagcgagtgaaagacagtagccaacaagatccactagtattagtaa

SEQ ID NO: 1024 - DNA, 752 bp, Streptococcus agalactiae
agttcaaaaaagttttaaatcaaatatacattacggaacactctatctagtcccaactccaattggtaatctagatgatatgacttttcgtgccattaggattttaagagaagttgattttatttgtgcagaggatacacgaaatacgggacttttactcaagcactttgatattactactaaacaaattagttttcacgaacacaatgcttacgataaaatctctgggttaattgatttgttaaaagaagggaaatctttagcccaagtatctgatgcaggaatgccctctatttctgacccaggacatgaccttgtcaaggctgctattgaaggggatatcccagttgtatctataccaggagctagcgctggtattactgctctcatcgcttcaggtttagctccacaacctcatattttttatggcttcttaccacgtaagaaaggtcaacaaataactttctttgaaacaaagcaagattaccctgaaacacaaatcttttatgagtcaccgtttcgagtctctgatacgctaaaacacatgaaagagatttacggagatcgccaagttgttttagtacgcgaattgacgaaactctatgaagagtatcaaagaggaaccattagtcaacttttagagcatattgaaaaggtccctctcaaaggtgaatgcttaattattgttgatggtaagagagataccgagcgagtgaaagacagtagccaacaagatccactagtattagtaa

SEQ ID NO: 1025 - DNA, 760 bp, Streptococcus agalactiae
gaaatgcaagttcaaaaaagttttaaatcaaatacacattacgggacactctatctagtcccaactccaattggtaatctagatgatatgacttttcgtgccattaggattttaagagaagttgattttatttgtgcagaggatacacgaaatacgggacttttactcaagcactttgatattactactaaacaaattagttttcacgaacacaatgcttatgataaaatctctgggttaattgatttgttaaaagaagggagatctttagcccaagtatctgatgcaggaatgccctctatttctgacccaggacatgaccttgtcaaggctgctattgaaggggatatcccggtcgtatctataccaggagctagcgctggtattactgctctcatcgcttcaggtttagctccacaacctcatattttttatggcttcttaccgcgtaagcaaggtcaacaaataactttttttgaaacaaagaaagattaccctgaaacacaaatcttttatgagtcaccgtttcgagtctctgatacgctaaaacacatgaaagagatttatggagatcgccaagttgttttagtacgcgaattgacgaaactctatgaagagtatcaaagaggaaccattagtcaacttttagggcatattgaaaaggtccctctcaaaggtgaatgcttaattattgttgatggtaagagagatactgagcgagtgaaagacagtagccaacaagatccactagtattagtaa

SEQ ID NO: 1026 - DNA, 760 bp, Streptococcus agalactiae
gaaatgcaagttcaaaaaagttttaaatcaaatatacattacggaacactctatctagtcccaactccaattggtaatctagatgatatgacttttcgtgccattaggattttaagagaagttgattttatttgtgcagaggatacacgaaatacgggacttttactcaagcactttgatattactactaaacaaattagttttcacgaacacaatgcttacgataaaatctctgggttaattgatttgttaaaagaagggaaatctttagcccaagtatctgatgcaggaatgccctctatttctgacccaggacatgaccttgtcaaggctgctattgaaggggatatcccagttgtatctataccaggagctagcgctggtattactgctctcatcgcttcaggtttagctccacaacctcatattttttatggcttcttaccacgtaagaaaggtcaacaaataactttctttgaaacaaagcaagattaccctgaaacacaaatcttttatgagtcaccgtttcgagtctctgatacgctaaaacacatgaaagagatttacggagatcgccaagttgttttagtacgcgaattgacgaaactctatgaagagtatcaaagaggaaccattagtcaacttttagagcatattgaaaaggtccctctcaaaggtgaatgcttaattattgttgatggtaagagagataccgagcgagtgaaagacagtagccaacaagatccactagtattagtaa

SEQ ID NO: 1027 - DNA, 760 bp, Streptococcus agalactiae; identical to SEQ ID NO: 1026

SEQ ID NO: 1028 - DNA, 760 bp, Streptococcus agalactiae; identical to SEQ ID NO: 1026

SEQ ID NO: 1029 - DNA, 760 bp, Streptococcus agalactiae
aaatgcaagttcaaaaaagttttaaatcaaatatacattacggaacactctatctagtcccaactccaattggtaatctagatgatatgacttttcgtgccattaggattttaagagaagttgattttatttgtgcagaggatacacgaaatacgggacttttactcaagcactttgatattactactaaacaaattagttttcacgaacacaatgcttacgataaaatctctgggttaattgatttgttaaaagaagggaaatctttagcccaagtatctgatgcaggaatgccctctatttctgacccaggacatgaccttgtcaaggctgctattgaaggggatatcccagttgtatctataccaggagctagcgctggtattactgctctcatcgcttcaggtttagctccacaacctcatattttttatggcttcttaccacgtaagaaaggtcaacaaataactttctttgaaacaaagcaagattaccctgaaacacaaatcttttatgagtcaccgtttcgagtctctgatacgctaaaacacatgaaagagatttacggagatcgccaagttgttttagtacgcgaattgacgaaactctatgaagagtatcaaagaggaaccattagtcaacttttagagcatattgaaaaggtccctctcaaaggtgaatgcttaattattgttgatggtaagagagataccgagcgagtgaaagacagtagccaacaagatccactagtattagtaaa

SEQ ID NO: 1030 - DNA, 760 bp, Streptococcus agalactiae; identical to SEQ ID NO: 1023

SEQ ID NO: 1031 - DNA, 756 bp, Streptococcus agalactiae
tgcaagttcaaaaaagttttaaatcaaatacacattatgggacactctatctagtcccaactccaattggtaatctagatgatatgacttttcgtgccattaggattttaagagaagttgattttatttgtgcagaggatacacgaaatacgggacttttactcaagcactttgatattactactaaacaaattagttttcacgaacacaatgcttacgataaaatctctgggttaattgatttgttaaaagaagggaaatctttagcccaagtatctgatgcaggaatgccctctatttctgacccaggacatgaccttgtcaaggctgctattgaaggggatatcccagttgtatctataccaggagctagcgctggtattactgctctcatcgcttcaggtttagctccacaacctcatattttttatggcttcttaccacgtaagaaaggtcaacaaataactttttttgaaacaaagcaagattatcctgaaacacaaatcttttatgagtcaccgtttcgagtctctgatacgctaaaacacatgaaagagatttacggagatcgccaagttgttttagtacgcgaattgacgaaactctatgaagagtatcaaagaggaaccattagtcaacttttagagcatattgaaaaggtccctctcaaaggtgaatgcttaattattgttgatggtaagagagataccgagcgagtgaaagacagtagccaacaagatccactagtattagtaa

SEQ ID NO: 1032 - DNA, 760 bp, Streptococcus agalactiae
gaaatgcaagttcaaaaaagttttaaatcaaatacacattacgggacactctatctagtcccaactccaattggtaatctagatgatatgacttttcgtgccattaggattttaagagaagttgattttatttgtgcagaggatacacgaaatacgggacttttactcaagcactttgatattactactaaacaaattagttttcacgaacacaatgcttatgataaaatctctgggttaattgatttgttaaaagaagggagatctttagcccaagtatctgatgcaggaatgccctctatttctgacccaggacatgaccttgtcaaggctgctattgaaggggatatcccggtcgtatctataccaggagctagcgctggtattactgctctcatcgcttcaggtttagctccacaacctcatattttttatggcttcttaccgcgtaagcaaggtcaacaaataactttttttgaaacaaagaaagattaccctgaaacacaaatcttttatgagtcaccgtttcgagtctctgatacgctaaaacacatgaaagagatttatggagatcgccaagttgttttagtacgcgaattgacgaaactctatgaagagtatcaaagaggaaccattagtcaacttttagggcatattgaaaaggtccctctcaaaggtgaatgcttaattattgttgatggtaagagagatactgagcgagtgaaagacagtagccaacaagatccagtagtattagtaa

SEQ ID NO: 1033 - protein, 289 aa, Streptococcus agalactiae
MEMQVQKSFKSNIHYGTLYLVPTPIGNLDDMTFRAIRILREVDFICAEDTRNTGLLLKHFDITTKQISFHEHNAYDKISGLIDLLKEGKSLAQVSDAGMPSISDPGHDLVKAAIEGDIPVVSIPGASAGITALIASGLAPQPHIFYGFLPRKKGQQITFFETKQDYPETQIFYESPFRVSDTLKHMKEIYGDRQVVLVRELTKLYEEYQRGTISQLLEHIEKVPLKGECLIIVDGKRDTERVKDSSQQDPLVLVKEYIANGDKTNQAIKKVAKEFNLNRQELYASFHDL

SEQ ID NO: 1034 - protein, 253 aa, Streptococcus agalactiae
EMQVQKSFKSNTHYGTLYLVPTPIGNLDDMTFRAIRILREVDFICAEDTRNTGLLLKHFDITTKQISFHEHNAYDKISGLIDLLKEGRSLAQVSDAGMPSISDPGHDLVKAAIEGGIPVVSIPGASAGITALIASGLAPQPHIFYGFLPRKKGQQITFFETKKDYPETQIFYESPFRVSDTLKHMKEIYGDRQVVLVRELTKLYEEYQRGTISQLLGHIEKVPLKGECLIIVDGKRDTERVKDSSQQDPLVLV

SEQ ID NO: 1035 - protein, 250 aa, Streptococcus agalactiae
VQKSFKSNIHYGTLYLVPTPIGNLDDMTFRAIRILREVDFICAEDTRNTGLLLKHFDITTKQISFHEHNAYDKISGLIDLLKEGKSLAQVSDAGMPSISDPGHDLVKAAIEGDIPVVSIPGASAGITALIASGLAPQPHIFYGFLPRKKGQQITFFETKQDYPETQIFYESPFRVSDTLKHMKEIYGDRQVVLVRELTKLYEEYQRGTISQLLEHIEKVPLKGECLIIVDGKRDTERVKDSSQQDPLVLV

SEQ ID NO: 1036 - protein, 253 aa, Streptococcus agalactiae
EMQVQKSFKSNTHYGTLYLVPTPIGNLDDMTFRAIRILREVDFICAEDTRNTGLLLKHFDITTKQISFHEHNAYDKISGLIDLLKEGRSLAQVSDAGMPSISDPGHDLVKAAIEGDIPVVSIPGASAGITALIASGLAPQPHIFYGFLPRKQGQQITFFETKKDYPETQIFYESPFRVSDTLKHMKEIYGDRQVVLVRELTKLYEEYQRGTISQLLGHIEKVPLKGECLIIVDGKRDTERVKDSSQQDPLVLV

SEQ ID NO: 1037 - protein, 253 aa, Streptococcus agalactiae
EMQVQKSFKSNIHYGTLYLVPTPIGNLDDMTFRAIRILREVDFICAEDTRNTGLLLKHFDITTKQISFHEHNAYDKISGLIDLLKEGKSLAQVSDAGMPSISDPGHDLVKAAIEGDIPVVSIPGASAGITALIASGLAPQPHIFYGFLPRKKGQQITFFETKQDYPETQIFYESPFRVSDTLKHMKEIYGDRQVVLVRELTKLYEEYQRGTISQLLEHIEKVPLKGECLIIVDGKRDTERVKDSSQQDPLVLV

SEQ ID NO: 1038 - protein, 253 aa, Streptococcus agalactiae; identical to SEQ ID NO: 1037

SEQ ID NO: 1039 - protein, 253 aa, Streptococcus agalactiae; identical to SEQ ID NO: 1037

SEQ ID NO: 1040 - protein, 252 aa, Streptococcus agalactiae
MQVQKSFKSNIHYGTLYLVPTPIGNLDDMTFRAIRILREVDFICAEDTRNTGLLLKHFDITTKQISFHEHNAYDKISGLIDLLKEGKSLAQVSDAGMPSISDPGHDLVKAAIEGDIPVVSIPGASAGITALIASGLAPQPHIFYGFLPRKKGQQITFFETKQDYPETQIFYESPFRVSDTLKHMKEIYGDRQVVLVRELTKLYEEYQRGTISQLLEHIEKVPLKGECLIIVDGKRDTERVKDSSQQDPLVLV

SEQ ID NO: 1041 - protein, 253 aa, Streptococcus agalactiae; identical to SEQ ID NO: 1034

SEQ ID NO: 1042 - protein, 251 aa, Streptococcus agalactiae
QVQKSFKSNTHYGTLYLVPTPIGNLDDMTFRAIRILREVDFICAEDTRNTGLLLKHFDITTKQISFHEHNAYDKISGLIDLLKEGKSLAQVSDAGMPSISDPGHDLVKAAIEGDIPVVSIPGASAGITALIASGLAPQPHIFYGFLPRKKGQQITFFETKQDYPETQIFYESPFRVSDTLKHMKEIYGDRQVVLVRELTKLYEEYQRGTISQLLEHIEKVPLKGECLIIVDGKRDTERVKDSSQQDPLVLV

SEQ ID NO: 1043 - protein, 253 aa, Streptococcus agalactiae
EMQVQKSFKSNTHYGTLYLVPTPIGNLDDMTFRAIRILREVDFICAEDTRNTGLLLKHFDITTKQISFHEHNAYDKISGLIDLLKEGRSLAQVSDAGMPSISDPGHDLVKAAIEGDIPVVSIPGASAGITALIASGLAPQPHIFYGFLPRKQGQQITFFETKKDYPETQIFYESPFRVSDTLKHMKEIYGDRQVVLVRELTKLYEEYQRGTISQLLGHIEKVPLKGECLIIVDGKRDTERVKDSSQQDPVVLV

SEQ ID NO: 1044 - DNA, 2193 bp, Streptococcus agalactiae
atgagcgtatatgttagtggaataggaattatttcttctttgggaaagaattatagcgagcataaacagcatctcttcgacttaaaagaaggaatttctaaacatttatataaaaatcacgactctattttagaatcttatacaggaagcataactagtgacccagaggttcctgagcaatacaaagatgagacacgtaattttaaatttgcttttaccgcttttgaagaggctcttgcttcttcaggtgttaatttaaaagcttatcataatattgctgtgtgtttagggacctcacttgggggaaagagtgctggtcaaaatgccttgtatcaatttgaagaaggagagcgtcaagtagatgctagtttattagaaaaagcatctgtttaccatattgctgatgaattgatggcttatcatgatattgtgggagcttcgtatgttatttcaaccgcctgttctgcaagtaataatgccgtaatattaggaacacaattacttcaagatggcgattgtgatttagctatttgtggtggctgtgatgagttaagtgatatttctttagcaggcttcacatcactaggagctattaatacagaaatggcatgtcagccctattcttctggaaaaggaatcaatttgggtgagggcgctggttttgttgttcttgtcaaagatcagtccttagctaaatatggaaaaattatcggtggtcttattacttcagatggttatcatataacagcacctaagccaacaggtgaaggggcggcacagattgcaaagcagctagtgactcaagcaggtattgactacagtgagattgactatattaacggtcacggtacaggtactcaagctaatgataaaatggaaaaaaatatgtatggtaagtttttcccgacaacgacattgatcagcagtaccaaggggcaaacgggtcatactctaggggctgcaggtattatcgaattgattaattgtttagcggcaatagaggaacagactgtaccagcaactaaaaatgagattgggatagaaggttttccagaaaattttgtctatcatcaaaagagagaatacccaataagaaatgctttaaatttttcgtttgcttttggtggaaataatagtggtgtcttattgtcatctttagattcacctctagaaacattacctgctagagaaaatcttaaaatggctatcttatcatctgttgcttccatttctaagaatgaatcactttctataacctatgaaaaagttgctagtaatttcaacgactttgaagcattacgctttaaaggggctagaccacccaaaactgtcaacccagcacaatttaggaaaatggatgatttttccaaaatggttgccgtaacaacagctcaagcactaatagaaagcaatattaatctaaaaaaacaagatacttcaaaagtaggaattgtatttacaacactttctggaccagttgaggttgttgaaggtattgaaaagcaaatcacaacagaaggatatgcacatgtttctgcttcacgattcccgtttacagtaatgaatgcagcagctggtatgctttctatcatttttaaaataacaggtcctttatctgtcatttcgacaaatagtggagcgcttgatggtatacaatatgccaaggaaatgatgcgtaacgataatctagactatgtgattcttgtttctgctaatcagtggacagacatgagttttatgtggtggcaacaattaaactatgatagtcaaatgtttgtcggttctgattattgttcagcacaagtcctctctcgtcaagcattggataattctcctataatattaggtagtaaacaattaaaatatagccataaaacattcacagatgtgatgactatttttgatgctgcgcttcaaaatttattatcagacttaggactaaccataaaagatatcaaaggtttcgtttggaatgagcggaagaaggcagttagttcagattatgatttcttagcgaacttgtctgagtattataatatgccaaaccttgcttctggtcagtttggattttcatctaatggtgctggtgaagaactggactatactgttaatgaaagtatagaaaagggctattatttagtcctatcttattcgatcttcggtggtatctcttttgctattattgaaaaaagg

SEQ ID NO: 1045 - DNA, 2183 bp, Streptococcus agalactiae
atgttagtggaataggaattatttcttctttgggaaagaattatagcgagcataaacagcatctcttcgacttaaaagaaggaatttctaaacatttatataaaaatcacgactctattttagaatcttatacaggaagcataactagtgacccagaggttcctgagcaatacaaagatgagacacgtaattttaaatttgcttttaccgcttttgaagaggctcttgcttcttcaggtgttaatttaaaagcttatcataatattgctgtgtgtttagggacctcacttgggggaaagagtgctggtcaaaatgccttgtatcaatttgaagaaggagagcgtcaagtagatgctagtttattagaaaaagcatctgtttaccatattgctgatgaattgatggcttatcatgatattgtgggagcttcgtatgttatttcaaccgcctgttctgcaagtaataatgccgtaatattaggaacacaattacttcaagatggcgattgtgatttagctatttgtggtggctgtgatgagttaagtgatatttctttagcaggcttcacatcactaggagctattaatacagaaatggcatgtcagccctattcttctggaaaaggaatcaatttgggtgagggcgctggttttgttgttcttgtcaaagatcagtccttagctaaatatggaaaaattatcggtggtcttattacttcagatggttatcatataacagcacctaagccaacaggtgaaggggcggcacagattgcaaagcagctagtgactcaagcaggtattgactacagtgagattgactatattaacggtcacggtacaggtactcaagctaatgataaaatggaaaaaaatatgtatggtaagtttttcccgacaacgacattgatcagcagtaccaaggggcaaacgggtcatactctaggggctgcaggtattatcgaattgattaattgtttagcggcaatagaggaacagactgtaccagcaactaaaaatgagattgggatagaaggttttccagaaaattttgtctatcatcaaaagagagaatacccaataagaaatgctttaaatttttcgtttgcttttggtggaaataatagtggtatcttattgtcatctttagattcacctctagaaacattacctgctagagaaaatcttaaaatggctatcttatcatctgttgcttccatttctaagaatgaatcactttctataacctatgaaaaagttgctagtaatttcaacgactttgaagcattacgctttaaaggggctagaccacccaaaactgtcaacccagcacaatttaggaaaatggatgatttttccaaaatggttgccgtaacaacagctcaagcactaatagaaagcaatattaatctaaaaaaacaagatacttcaaaagtaggaattgtatttacaacactttctggaccagttgaggttgttgaaggtattgaaaagcaaatcacaacagaaggatatgcacatgtttctgcttcacgattcccgtttacagtaatgaatgcagcagctggtatgctttctatcatttttaaaataacaggtcctttatctgtcatttcgacaaatagtggagcgcttgatggtatacaatatgccaaggaaatgatgcgtaacgataatctagactatgtgattcttgtttctgctaatcagtggacagacatgagttttatgtggtggcaacaattaaactatgatagtcaaatgtttgtcggttctgattattgttcagcacaagtcctctctcgtcaagcattggataattctcctataatattaggtagtaaacaattaaaatatagccataaaacattcacagatgtgatgactatttttgatgctgcgcttcaaaatttattatcagacttaggactaaccataaaagatatcaaaggtttcgtttggaatgagcggaagaaggcagttagttcagattatgatttcttagcgaacttgtctgagtattataatatgccaaaccttgcttctggtcagtttggattttcatctaatggtgctggtgaagaactggactatactgttaatgaaagtatagaaaagggctattatttagtcctatcttattcgatctttggtggtatctcttttgctattattgaaaaaagg

SEQ ID NO: 1046 - DNA, 2183 bp, Streptococcus agalactiae
atgttagtggaataggaattatttcttctttgggaaagaattatagcgagcataaacagcatctcttcgacttaaaagaaggaatttctaaacatttatataaaaatcacgactctattttagaatcttatacaggaagcataactagtgacccagaggttcctgagcaatacaaagatgagacacgtaattttaaatttgcttttaccgcttttgaagaggctcttgcttcttcaggtgttaatttaaaagcttatcataatattgctgtgtgtttagggacctcacttgggggaaagagtgctggtcaaaatgccttgtatcaatttgaagaaggagagcgtcaagtagatgctagtttattagaaaaagcatctgtttaccatattgctgatgaattgatggcttatcatgatattgtgggagcttcgtatgttatttcaaccgcctgttctgcaagtaataatgccgtaatattaggaacacaattacttcaagatggcgattgtgatttagctatttgtggtggctgtgatgagttaagtgatatttctttagcaggcttcacatcactaggagctattaatacagaaatggcatgtcagccctattcttctggaaaaggaatcaatttgggtgagggcgctggttttgttgttcttgtcaaagatcagtccttagctaaatatggaaaaattatcggtggtcttattacttcagatggttatcatataacagcacctaagccaacaggtgaaggggcggcacagattgcaaagcagctagtgactcaagcaggtattgactacagtgagattgactatattaacggtcacggtacaggtactcaagctaatgataaaatggaaaaaaatatgtatggtaagtttttcccgacaacgacattgatcagcagtaccaaggggcaaacgggtcatactctaggggctgcaggtattatcgaattgattaattgtttagcggcaatagaggaacagactgtaccagcaactaaaaatgagattgggatagaaggttttccagaaaattttgtctatcatcaaaagagagaatacccaataagaaatgctttaaatttttcgtttgcttttggtggaaataatagtggtgtcttattgtcatctttagattcacctctagaaacattacctgctagagaaaatcttaaaatggctatcttatcatctgttgcttccatttctaagaatgaatcactttctataacctatgaaaaagttgctagtaatttcaacgactttgaagcattacgctttaaaggggctagaccacccaaaactgtcaacccagcacaatttaggaaaatggatgatttttccaaaatggttgccgtaacaacagctcaagcactaatagaaagcaatattaatctaaaaaaacaagatacttcaaaagtaggaattgtatttacaacactttctggaccagttgaggttgttgaaggtattgaaaagcaaatcacaacagaaggatatgcacatgtttctgcttcacgattcccgtttacagtaatgaatgcagcagctggtatgctttctatcatttttaaaataacaggtcctttatctgtcatttcgacaaatagtggagcgcttgatggtatacaatatgccaaggaaatgatgcgtaacgataatctagactatgtgattcttgtttctgctaatcagtggacagacatgagttttatgtggtggcaacaattaaactatgatagtcaaatgtttgtcggttctgattattgttcagcacaagtcctctctcgtcaagcattggataattctcctataatattaggtagtaaacaattaaaatatagccataaaacattcacagatgtgatgactatttttgatgctgcgcttcaaaatttattatcagacttaggactaaccataaaagatatcaaaggtttcgtttggaatgagcggaagaaggcagttagttcagattatgatttcttagcgaacttgtctgagtattataatatgccaaaccttgcttctggtcagtttggattttcatctaatggtgctggtgaagaactggactatactgttaatgaaagtatagaaaagggctattatttagtcctatcttattcgatcttcggtggtatctcttttgctattattgaaaaaagg

SEQ ID NO: 1047 - DNA, 2183 bp, Streptococcus agalactiae; identical to SEQ ID NO: 1046

SEQ ID NO: 1048 - DNA, 2183 bp, Streptococcus agalactiae; identical to SEQ ID NO: 1046

SEQ ID NO: 1049 - DNA, 2183 bp, Streptococcus agalactiae; identical to SEQ ID NO: 1046

SEQ ID NO: 1050 - DNA, 2183 bp, Streptococcus agalactiae; identical to SEQ ID NO: 1046

SEQ ID NO: 1051 - DNA, 2183 bp, Streptococcus agalactiae
atgttagtggaataggaattatttcttctttgggaaagaattatagcgagcataaacagcatctcttcgacttaaaagaaggaatttctaaacatttatataaaaatcacgactctattttagaatcttatacaggaagcataactagtgacccagaggttcctgagcaatacaaagatgagacacgtaattttaaatttgcttttaccgcttttgaagaggctcttgcttcttcaggtgttaatttaaaagcttatcataatattgctgtgtgtttagggacctcacttgggggaaagagtgctggtcaaaatgccttgtatcaatttgaagaaggagagcgtcaagtagatgctagtttattagaaaaagcatctgtttaccatattgctgatgaattgatggcttatcatgatattgtgggagcttcgtatgttatttcaaccgcctgttctgcaagtaataatgccgtaatattaggaacacaattacttcaagatggcgattgtgatttagctatttgtggtggctgtgatgagttaagtgatatttctttagcaggcttcacatcactaggagctattaatacagaaatggcatgtcagccctattcttctggaaaaggaatcaatttgggtgagggcgctggttttgttgttcttgtcaaagatcagtccttagctaaatatggaaaaattatcggtggtcttattacttcagatggttatcatataacagcacctaagccaacaggtgaaggggcggcacagattgcaaagcagctagtgactcaagcaggtattgactacagtgagattgactatattaatggtcacggtacaggtactcaagctaatgataaaatggaaaaaaatatgtatggtaagtttttcccgacaacgacattgatcagcagtaccaaggggcaaacgggtcatactctaggggctgcaggtattatcgaattgattaattgtttagcggcaatagaggaacagactgtaccagcaactaaaaatgagattgggatagaaggttttccagaaaattttgtctatcatcaaaagagagaatacccaataagaaatgctttaaatttttcgtttgcttttggtggaaataatagtggtatcttattgtcatctttagattcacctctagaaacattacctgctagagaaaatcttaaaatggctatcttatcatctgttgcttccatttctaagaatgaatcactttctataacctatgaaaaagttgctagtaatttcaacgactttgaagcattacgctttaaaggggctagaccacccaaaactgtcaacccagcacaatttaggaaaatggatgatttttccaaaatggttgccgtaacaacagctcaagcactaatagaaagcaatattaatctaaaaaaacaagatacttcaaaagtaggaattgtatttacaacactttctggaccagttgaggttgttgaaggtattgaaaagcaaatcacaacagaaggatatgcacatgtttctgcttcacgattcccgtttacagtaatgaatgcagcagctggtatgctttctatcatttttaaaataacaggtcctttatctgtcatttcgacaaatagtggagcgcttgatggtatacaatatgccaaggaaatgatgcgtaacgataatctagactatgtgattcttgtttctgctaatcagtggacagacatgagttttatgtggtggcaacaattaaactatgatagtcaaatgtttgtcggttctgattattgttcagcacaagtcctctctcgtcaagcattggataattctcctataatattaggtagtaaacaattaaaatatagccataaaacattcacagatgtgatgactatttttgatgctgcgcttcaaaatttattatcagacttaggactaaccataaaagatatcaaaggtttcgtttggaatgagcggaagaaggcagttagttcagattatgatttcttagcgaacttgtctgagtattataatatgccaaaccttgcttctggtcagtttggattttcatctaatggtgctggtgaagaactggactatactgttaatgaaagtatagaaaagggctattatttagtcctatcttattcgatctttggtggtatctcttttgctattattgaaaaaagg

SEQ ID NO: 1052 - DNA, 2183 bp, Streptococcus agalactiae; identical to SEQ ID NO: 1051

SEQ ID NO: 1053 - DNA, 2183 bp, Streptococcus agalactiae; identical to SEQ ID NO: 1045

SEQ ID NO: 1054 - DNA, 2183 bp, Streptococcus agalactiae; identical to SEQ ID NO: 1046

SEQ ID NO: 1055 - protein, 731 aa, Streptococcus agalactiae
MSVYVSGIGIISSLGKNYSEHKQHLFDLKEGISKHLYKNHDSILESYTGSITSDPEVPEQYKDETRNFKFAFTAFEEALASSGVNLKAYHNIAVCLGTSLGGKSAGQNALYQFEEGERQVDASLLEKASVYHIADELMAYHDIVGASYVISTACSASNNAVILGTQLLQDGDCDLAICGGCDELSDISLAGFTSLGAINTEMACQPYSSGKGINLGEGAGFVVLVKDQSLAKYGKIIGGLITSDGYHITAPKPTGEGAAQIAKQLVTQAGIDYSEIDYINGHGTGTQANDKMEKNMYGKFFPTTTLISSTKGQTGHTLGAAGIIELINCLAAIEEQTVPATKNEIGIEGFPENFVYHQKREYPIRNALNFSFAFGGNNSGVLLSSLDSPLETLPARENLKMAILSSVASISKNESLSITYEKVASNFNDFEALRFKGARPPKTVNPAQFRKMDDFSKMVAVTTAQALIESNINLKKQDTSKVGIVFTTLSGPVEVVEGIEKQITTEGYAHVSASRFPFTVMNAAAGMLSIIFKITGPLSVISTNSGALDGIQYAKEMMRNDNLDYVILVSANQWTDMSFMWWQQLNYDSQMFVGSDYCSAQVLSRQALDNSPIILGSKQLKYSHKTFTDVMTIFDAALQNLLSDLGLTIKDIKGFVWNERKKAVSSDYDFLANLSEYYNMPNLASGQFGFSSNGAGEELDYTVNESIEKGYYLVLSYSIFGGISFAIIEKR

SEQ ID NO: 1056 - protein, 727 aa, Streptococcus agalactiae
VSGIGIISSLGKNYSEHKQHLFDLKEGISKHLYKNHDSILESYTGSITSDPEVPEQYKDETRNFKFAFTAFEEALASSGVNLKAYHNIAVCLGTSLGGKSAGQNALYQFEEGERQVDASLLEKASVYHIADELMAYHDIVGASYVISTACSASNNAVILGTQLLQDGDCDLAICGGCDELSDISLAGFTSLGAINTEMACQPYSSGKGINLGEGAGFVVLVKDQSLAKYGKIIGGLITSDGYHITAPKPTGEGAAQIAKQLVTQAGIDYSEIDYINGHGTGTQANDKMEKNMYGKFFPTTTLISSTKGQTGHTLGAAGIIELINCLAAIEEQTVPATKNEIGIEGFPENFVYHQKREYPIRNALNFSFAFGGNNSGILLSSLDSPLETLPARENLKMAILSSVASISKNESLSITYEKVASNFNDFEALRFKGARPPKTVNPAQFRKMDDFSKMVAVTTAQALIESNINLKKQDTSKVGIVFTTLSGPVEVVEGIEKQITTEGYAHVSASRFPFTVMNAAAGMLSIIFKITGPLSVISTNSGALDGIQYAKEMMRNDNLDYVILVSANQWTDMSFMWWQQLNYDSQMFVGSDYCSAQVLSRQALDNSPIILGSKQLKYSHKTFTDVMTIFDAALQNLLSDLGLTIKDIKGFVWNERKKAVSSDYDFLANLSEYYNMPNLASGQFGFSSNGAGEELDYTVNESIEKGYYLVLSYSIFGGISFAIIEKR

SEQ ID NO: 1057 - protein, 727 aa, Streptococcus agalactiae
VSGIGIISSLGKNYSEHKQHLFDLKEGISKHLYKNHDSILESYTGSITSDPEVPEQYKDETRNFKFAFTAFEEALASSGVNLKAYHNIAVCLGTSLGGKSAGQNALYQFEEGERQVDASLLEKASVYHIADELMAYHDIVGASYVISTACSASNNAVILGTQLLQDGDCDLAICGGCDELSDISLAGFTSLGAINTEMACQPYSSGKGINLGEGAGFVVLVKDQSLAKYGKIIGGLITSDGYHITAPKPTGEGAAQIAKQLVTQAGIDYSEIDYINGHGTGTQANDKMEKNMYGKFFPTTTLISSTKGQTGHTLGAAGIIELINCLAAIEEQTVPATKNEIGIEGFPENFVYHQKREYPIRNALNFSFAFGGNNSGVLLSSLDSPLETLPARENLKMAILSSVASISKNESLSITYEKVASNFNDFEALRFKGARPPKTVNPAQFRKMDDFSKMVAVTTAQALIESNINLKKQDTSKVGIVFTTLSGPVEVVEGIEKQITTEGYAHVSASRFPFTVMNAAAGMLSIIFKITGPLSVISTNSGALDGIQYAKEMMRNDNLDYVILVSANQWTDMSFMWWQQLNYDSQMFVGSDYCSAQVLSRQALDNSPIILGSKQLKYSHKTFTDVMTIFDAALQNLLSDLGLTIKDIKGFVWNERKKAVSSDYDFLANLSEYYNMPNLASGQFGFSSNGAGEELDYTVNESIEKGYYLVLSYSIFGGISFAIIEKR

SEQ ID NO: 1058 - protein, 727 aa, Streptococcus agalactiae; identical to SEQ ID NO: 1057

SEQ ID NO: 1059 - protein, 727 aa, Streptococcus agalactiae; identical to SEQ ID NO: 1057

SEQ ID NO: 1060 - protein, 727 aa, Streptococcus agalactiae; identical to SEQ ID NO: 1057

SEQ ID NO: 1061 - protein, 727 aa, Streptococcus agalactiae; identical to SEQ ID NO: 1057

SEQ ID NO: 1062 - protein, 727 aa, Streptococcus agalactiae; identical to SEQ ID NO: 1056

SEQ ID NO: 1063 - protein, 727 aa, Streptococcus agalactiae; identical to SEQ ID NO: 1056

SEQ ID NO: 1064 - protein, 727 aa, Streptococcus agalactiae; identical to SEQ ID NO: 1056

SEQ ID NO: 1065 - protein, 727 aa, Streptococcus agalactiae; identical to SEQ ID NO: 1057

SEQ ID NO: 1066 - DNA, 714 bp, Streptococcus agalactiae
atgaaaaaagtcatcgatttaaaaaaactacaaaaagcatatgcctcagaaaccgttttaaataatattaatttggaggtgtttaaaggcgaaataattggattaataggaccctctggagcagggaaatctaccttgattaaaactatgcttggcatggaaaaagcagataagggaacagctcttgttcttgatactcaaatgccagatcgtaatattttaaatcaaattggctatatggctcaatctgatgccttatacgagtctttaactggcttagaaaatttattattctttggaaaaatgaaaggtattcaaaaaactgaattaaaacagcagataactcatatttctaaagtagtagatctagaaaaccaacttgataaatttgtctcaggttactcaggaggtatgaaaagacggctttctctagccatcgccctacttggaaaccccacagttttaatcctagatgaacctaccgttggaattgatccatccttgaggagaaaaatctggcaagagctaattaatattaaggatgaaggacattctatctttattacaacccacgttatggatgaagcagaattaacaagtaaggttgcactactattacgtggaaacattattgcctttgatactccattacatttaaaaaaacaatttaatgtgagtactattgaggaagttttcttaaaagctgaaggagaa

SEQ ID NO: 1067 - DNA, 698 bp, Streptococcus agalactiae
atttaaaaaaactacaaaaagcatatgcctcagaaactgttttaaataatattaatttggaggtgtttaaaggcgaaataattggattaataggaccctctggagcagggaaatctaccttgattaaaactatgcttggcatggaaaaagcagataagggaacagctcttgttcttgatactcaaatgccagatcgtaatattttaaatcaaattggctatatggctcaatctgatgccttatacgaatctttaactgccttagaaaatttattattctttggaaaaatgaaaggtattcaaaaaactgaattaaaacagcagataactcatatttctaaagtagtagatctagaaaaccaacttgataaatttgtctcaggttactcaggaggtatgaaaagacggctttctctagccatcgccctacttggaaaccccacagttttaatcctagatgaacctaccgttggaattgatccatccttgaggagaaaaatctggcaagagctaattaatattaaggatgaaggacgttctatctttattacaacccacgttatggatgaagcagaattaacaagtaaggttgcactactattacgtggaaacattattgcctttgatactccattacatttaaaaaaacaatttaatgtgagtactattgaggaagttttcttaaaagctgaaggagaa

SEQ ID NO: 1068 - DNA, 711 bp, Streptococcus agalactiae
aaaaaagtcatcgatttaaaaaaactacaaaaagcatatgcctcagaaaccgttttaaataatattaatttggaggtgtttaaaggcgaaataattggattaataggaccctctggagcagggaaatctaccttgattaaaactatgcttggcatggaaaaagcagataagggaacagctcttgttcttgatactcaaatgccagatcataatattttaaatcaaattggctatatggctcaatctgatgccttatacgagtctttaactggcttagaaaatttattattctttggaaaaatgaaaggtattcaaaaaactgaattaaaacagcagataactcatatttctaaagtagtagatctagaaaaccaacttgataaatttgtctcaggttactcaggaggtatgaaaagacggctttctctagccatcgccctacttggaaaccccacagttttaatcctagatgaacctaccgttggaattgatccatccttgaggagaaaaatctggcaagagctaattaatattaaggatgaaggacgttctatctttattacaacccacgttatggatgaagcagaattaacaagtaaggttgcactactattacgtggaaacattattgcctttgatactccattacatttaaaaaaacaatttaatgtgagtactattgaggaagttttcttaaaagctgaaggagaa

SEQ ID NO: 1069 - DNA, 711 bp, Streptococcus agalactiae
aaaaaagtcattgatttaaaaaaactacaaaaagcatatgcctcagaaaccgttttaaataatattaatttggaggtgtttaaaggcgaaataattggattaataggaccctctggagcagggaaatctaccttgattaaaactatgcttggcatggaaaaagcagataagggaacagctcttgttcttgatactcaaatgccagatcgtaatattttaaatcaaattggctatatggctcaatctgatgccttatacgagtctttaactggcttagaaaatttattattctttggaaaaatgaaaggtattcaaaaaactgaattaaaacagcagataactcatatttctaaagtagtagatctagaaaaccaacttgataaatttgtctcaggttactcaggaggtatgaaaagacggctttctctagccatcgccctacttggaaaccccacagttttaatcctagatgaacctaccgttggaattgatccatccttgaggagaaaaatctggcaagagctaattaatattaaggatgaaggacgttctatctttattacaacccacgttatggatgaagcagaattaacaagtaaggttgcactactattacgtggaaacattattgcctttgatactccattacatttaaaaaaacaatttaatgtgagtactattgaggaagttttcttaaaagctgaaggagaa

SEQ ID NO: 1070 - DNA, 699 bp, Streptococcus agalactiae
gatttaaaaaaactacaaaaagcatatgcctcagaaaccgttttaaataatattaatttggaggtgtttaaaggcgaaataattggattaataggaccctctggagcagggaaatctaccttgattaaaactatgcttggcatggaaaaagcagataagggaacagctcttgttcttgatactcaaatgccagatcgtaatattttaaatcaaattggctatatggctcaatctgatgccttatacgagtctttaactggcttagaaaatttattattctttggaaaaatgaaaggtattcaaaaaactgaattaaaacagcagataactcatatttctaaagtagtagatctagaaaaccaacttgataaatttgtctcaggttactcaggaggtatgaaaagacggctttctctagccatcgccctacttggaaaccccacagttttaatcctagatgaacctaccgttggaattgatccatccttgaggagaaaaatctggcaagagctaattaatattaaggatgaaggacattctatctttattacaacccacgttatggatgaagcagaattaacaagtaaggttgcactactattacgtggaaacattattgcctttgatactccattacatttaaaaaaacaatttaatgtgagtactattgaggaagttttcttaaaagctgaaggagaa

SEQ ID NO: 1071 - DNA, 711 bp, Streptococcus agalactiae
aaaaaagtcatcgatttaaaaaaactacaaaaagcatacgcctcagaaactgttttaaataatattaatttggaggtgtttaaaggagaaataattggattaataggaccctctggagcagggaaatctaccttgattaaaactatgcttggcatggaaaaagcagataagggaacagctcttgttcttgatactcaaatgccagatcgtaatattttaaatcaaattggctatatggctcaatctgatgccttacacgagtctttaactggcttagaaaatttattattctttggaaaaatgaaaggtattcaaaaaactgaattaaaacagcagataactcatatttctaaagtagtagatctagaaaaccaacttgataaatttgtctcaggttactcaggaggtatgaaaagacggctttctctagccatcgccctacttggaaaccccacagttttaatcctagatgaacctaccgttggaattgatccatccttgaggagaaaaatctggcaagagctaattaatattaaggatgaaggacgttctatctttattacaacccacgttatggatgaagcagaattaacaagtaaggttgcactactattacgtggaaacattattgcctttgatactccattacatttaaaaaaacaatttaatgtgagtactattgaggaagttttcttaaaagctgaaggagaa

SEQ ID NO: 1072 - DNA, 688 bp, Streptococcus agalactiae
aaaaaagtcatcgatttaaaaaaactacaaaaagcatacgcctcagaaactgttttaaataatattaatttggaggtgtttaaaggagaaataattggattaataggaccctctggagcagggaaatctaccttgattaaaactatgcttggcatggaaaaagcagataagggaacagctcttgttcttgatactcaaatgccagatcgtaatattttaaatcaaattggctatatggctcaatctgatgccttacacgagtctttaactggcttagaaaatttattattctttggaaaaatgaaaggtattcaaaaaactgaattaaaacagcagataactcatatttctaaagtagtagatctagaaaaccaacttgataaatttgtctcaggttactcaggaggtatgaaaagacggctttctctagccatcgccctacttggaaaccccacagttttaatcctagatgaacctaccgttggaattgatccatccttgaggagaaaaatctggcaagagctaattaatattaaggatgaaggacgttctatctttattacaacccacgttatggatgaagcagaattaacaagtaaggttgcactactattacgtggaaacattattgcctttgatactccattacatttaaaaaaacaatttaatgtgagtactattgaggaag

SEQ ID NO: 1073 - DNA, 711 bp, Streptococcus agalactiae; identical to SEQ ID NO: 1071

SEQ ID NO: 1074 - DNA, 711 bp, Streptococcus agalactiae
aaaaaagtcatcgatttaaaaaaactacaaaaagcatatgcctcagaaactgttttaaataatattaatttggaggtgtttaaaggcgaaataattggattaataggaccctctggagcagggaaatctaccttgattaaaactatgcttggcatggaaaaagcagataagggaacagctcttgttcttgatactcaaatgccagatcgtaatattttaaatcaaattggctatatggctcaatctgatgccttatacgaatctttaactgccttagaaaatttattattctttggaaaaatgaaaggtattcaaaaaactgaattaaaacagcagataactcatatttctaaagtagtagatctagaaaaccaacttgataaatttgtctcaggttactcaggaggtatgaaaagacggctttctctagccatcgccctacttggaaaccccacagttttaatcctagatgaacctaccgttggaattgatccatccttgaggagaaaaatctggcaagagctaattaatattaaggatgaaggacgttctatctttattacaacccacgttatggatgaagcagaattaacaagtaaggttgcactactattacgtggaaacattattgcctttgatactccattacatttaaaaaaacaatttaatgtgagtactattgaggaagttttcttaaaagctgaaggagaa

SEQ ID NO: 1075 - DNA, 711 bp, Streptococcus agalactiae
aaaaaagtcatcgatttaaaaaaactacaaaaagcatacgcctcagaaactgttttaaataatattaatttggaggtgtttaaaggcgaaataattggattaataggaccctctggagcagggaaatctaccttgattaaaactatgcttggcatggaaaaagcagataagggaacagctcttgttcttgatactcaaatgccagatcgtaatattttaaatcaaattggctatatggctcaatctgatgccttatacgaatctttaactgccttagaaaatttattattctttggaaaaatgaaaggtattcaaaaaactgaattaaaacagcagataactcatatttctaaagtagtagatctagaaaaccaacttgataaatttgtctcaggttactcaggaggtatgaaaagacggctttctctagccatcgccctacttggaaaccccacagttttaatcctagatgaacctaccgttggaattgatccatccttgaggagaaaaatctggcaagagctaattaatattaaggatgaaggacgttctatctttattacaacccacgttatggatgaagcagaattaacaagtaaggttgcactactattacgtggaaacattattgcctttgatactccattacatttaaaaaaacaatttaatgtgagtactattgaggaagttttcttaaaagctgaaggagaa

SEQ ID NO: 1076 - DNA, 711 bp, Streptococcus agalactiae
aaaaaagtcatcgatttaaaaaaactacaaaaagcatatgcctcagaaaccgttttaaataatattaatttggaggtgtttaaaggcgaaataattggattaataggaccctctggagcagggaaatctaccttgattaaaactatgcttggcatggaaaaagcagataagggaacagctcttgttcttgatactcaaatgccagatcgtaatattttaaatcaaattggctatatggctcaatctgatgccttatacgagtctttaactggcttagaaaatttattattctttggaaaaatgaaaggtattcaaaaaactgaattaaaacagcagataactcatatttctaaagtagtagatctagaaaaccaacttgataaatttgtctcaggttactcaggaggtatgaaaagacggctttctctagccatcgccctacttggaaaccccacagttttaatcctagatgaacctaccgttggaattgatccatccttgaggagaaaaatctggcaagagctaattaatattaaggatgaaggacgttctatctttattacaacccacgttatggatgaagcagaattaacaagtaaggttgcactactattacgtggaaacattattgcctttgatactccattacatttaaaaaaacaatttaatgtgagtactattgaggaagttttcttaaaagctgaaggagaa

SEQ ID NO: 1077 - protein, 224 aa, Streptococcus agalactiae
KKVIDLKKLQKAYASETVLNNINLEVFKGEIIGLIGPSGAGKSTLIKTMLGMEKADKGTALVLDTQMPDRNILNQIGYMAQSDALYESLTGLENLLFFGKMKGIQKTELKQQITHISKVVDLENQLDKFVSGYSGGMKRRLSLAIALLGNPTVLILDEPTVGIDPSLRRKIWQELINIKDEGHSIFITTHVMDEAELTSKVALLLRGNIIAFDTPLHLKKQFNV

SEQ ID NO: 1078 - protein, 219 aa, Streptococcus agalactiae
LKKLQKAYASETVLNNINLEVFKGEIIGLIGPSGAGKSTLIKTMLGMEKADKGTALVLDTQMPDRNILNQIGYMAQSDALYESLTALENLLFFGKMKGIQKTELKQQITHISKVVDLENQLDKFVSGYSGGMKRRLSLAIALLGNPTVLILDEPTVGIDPSLRRKIWQELINIKDEGRSIFITTHVMDEAELTSKVALLLRGNIIAFDTPLHLKKQFNV

SEQ ID NO: 1079 - protein, 224 aa, Streptococcus agalactiae
KKVIDLKKLQKAYASETVLNNINLEVFKGEIIGLIGPSGAGKSTLIKTMLGMEKADKGTALVLDTQMPDHNILNQIGYMAQSDALYESLTGLENLLFFGKMKGIQKTELKQQITHISKVVDLENQLDKFVSGYSGGMKRRLSLAIALLGNPTVLILDEPTVGIDPSLRRKIWQELINIKDEGRSIFITTHVMDEAELTSKVALLLRGNIIAFDTPLHLKKQFNV

SEQ ID NO: 1080 - protein, 224 aa, Streptococcus agalactiae
KKVIDLKKLQKAYASETVLNNINLEVFKGEIIGLIGPSGAGKSTLIKTMLGMEKADKGTALVLDTQMPDRNILNQIGYMAQSDALYESLTGLENLLFFGKMKGIQKTELKQQITHISKVVDLENQLDKFVSGYSGGMKRRLSLAIALLGNPTVLILDEPTVGIDPSLRRKIWQELINIKDEGRSIFITTHVMDEAELTSKVALLLRGNIIAFDTPLHLKKQFNV

SEQ ID NO: 1081 - protein, 220 aa, Streptococcus agalactiae
DLKKLQKAYASETVLNNINLEVFKGEIIGLIGPSGAGKSTLIKTMLGMEKADKGTALVLDTQMPDRNILNQIGYMAQSDALYESLTGLENLLFFGKMKGIQKTELKQQITHISKVVDLENQLDKFVSGYSGGMKRRLSLAIALLGNPTVLILDEPTVGIDPSLRRKIWQELINIKDEGHSIFITTHVMDEAELTSKVALLLRGNIIAFDTPLHLKKQFNV

SEQ ID NO: 1082 - protein, 224 aa, Streptococcus agalactiae
KKVIDLKKLQKAYASETVLNNINLEVFKGEIIGLIGPSGAGKSTLIKTMLGMEKADKGTALVLDTQMPDRNILNQIGYMAQSDALHESLTGLENLLFFGKMKGIQKTELKQQITHISKVVDLENQLDKFVSGYSGGMKRRLSLAIALLGNPTVLILDEPTVGIDPSLRRKIWQELINIKDEGRSIFITTHVMDEAELTSKVALLLRGNIIAFDTPLHLKKQFNV

SEQ ID NO: 1083 - protein, 224 aa, Streptococcus agalactiae; identical to SEQ ID NO: 1082

SEQ ID NO: 1084 - protein, 224 aa, Streptococcus agalactiae; identical to SEQ ID NO: 1082

SEQ ID NO: 1085 - protein, 224 aa, Streptococcus agalactiae
KKVIDLKKLQKAYASETVLNNINLEVFKGEIIGLIGPSGAGKSTLIKTMLGMEKADKGTALVLDTQMPDRNILNQIGYMAQSDALYESLTALENLLFFGKMKGIQKTELKQQITHISKVVDLENQLDKFVSGYSGGMKRRLSLAIALLGNPTVLILDEPTVGIDPSLRRKIWQELINIKDEGRSIFITTHVMDEAELTSKVALLLRGNIIAFDTPLHLKKQFNV

SEQ ID NO: 1086 - protein, 224 aa, Streptococcus agalactiae; identical to SEQ ID NO: 1085

SEQ ID NO: 1087 - protein, 224 aa, Streptococcus agalactiae; identical to SEQ ID NO: 1080

SEQ ID NO: 1088 - DNA, 849 bp, Streptococcus agalactiae
ttgcctatgttgtctgttggtttagttttagagggtggcggaatgagaggtctttatactgctggagttttagatgcttttctagatgcaggaataaaaatagatggtatcgtatctgtctctgctggtgcattgtttggtgttaattttgtatctagacaacgagagagggctttgcgatacaataaaaagtatttatcccaccctaaatatatgagtctaaggtcatggtttcgaacagggaattttgttaataaagatttcacctattatgaagttcctatgaaattggatgtatttgacgatgaagcatttaaaaaatcaagtattgatttttacgtagttgctacagagatgacatctggtaaacctgaatattttaaaattgatagtgtttttgaacaaatggaaattttacgtgctagttcagcattaccagtagtctcaaagatggttgattggcaggggaaaaagtacttagatggtggtttatctgatagtattcccgttgattttgcccgtggtttaggatttgacaagttgattgttgtgatgactaggccgctcaattatcagaaaaagccttcaagtggacgattgtataaaactctgtataggaaatatcctaattttgtaaagacagcctcgaatcggtaccaacagtataataatagtcttgaaaaggtcatgagccttgaaaaaacaggcgatctatttgcaattagaccgagtaagagcttggttattggccgcttagagaagaatccggataaacttgatagtatttatcagcttggtatgaaagatgctaaaagtgtgatgcctgagctgaatagttatctaatgaaa

SEQ ID NO: 1089 - DNA, 846 bp, Streptococcus agalactiae
cctatgttgtctgttggtttagttttagagggtggcggaatgagaggtctttatactgctggagttttagatgcttttctagatgcaggaataaaaatagatggtatcgtatctgtctctgctggtgcattgtttggtgttaattttgtatctagacaacgagagagggctttgcgatacaataaaaagtatttatcccaccctaaatatatgagtctaaggtcatggtttcgaacagggaattttgttaataaagatttcacctattatgaagttcctatgaaattggatgtatttgacgatgaagcatttaaaaaatcaagtattgatttttacgtagttgctacagagatgacatctggtaaacctgaatattttaaaattgatagtgtttttgaacaaatggaaattttacgtgctagttcagcattaccagtagtctcaaagatggttgattggcaggggaaaaagtacttagatggtggtttatctgatagtattcccgttgattttgcccgtggtttaggatttgacaagttgattgttgtgatgactaggccgctcaattatcagaaaaagccttcaagtggacgattgtataaaactctgtataggaaatatcctaattttgtaaagacagcctcgaatcggtaccaacagtataataatagtcttgaaaaggtcatgagccttgaaaaaacaggcgatctatttgcaattagaccgagtaagagcttggttattggccgcttagagaagaatccggataaacttgatagtatttatcagcttggtatgaaagatgctaaaagtgtgatgcctgagctgaatagttatctaatgaaa

SEQ ID NO: 1090 - DNA, 846 bp, Streptococcus agalactiae
cctatgttgtctgttggtttagttttagagggtggcggaatgagaggtctttatactgctggagttttagatgcttttctagatgcaggaataaaagtagatggtatcatatctgtctctgctggtgcattgtttggtgttaattttgtatctagacaacgagagagggctttgcgatacaataaaaagtatttatcccaccctaaatatatgagtctaaggtcatggcttcgaacagggaattttgttaataaagatttcacctattatgaagttcctatgaaattggatgtatttgacgatgaagcatttaaaaaatcaagtattgatttttacgcagttgctacagagatgacatctggtaaacctgagtattttaaaattgatagtgtttttgaacaaatggaaattttacgtgctagttcagcattaccagtagtctcaaagatggttgtttggcaggggaaaaagtacttagatggtggtttatctgatagtattcccgttgattttgcccgtggtttaggatttgacaagttgattgttgtgatgactaggccgctcaattatcagaaaaagccttcaagtggacgattgtataaaactctgtataggaaatatcctaattttgtaaagacagcctcgaaccggtaccaacagtataataatagccttgaaaaggtcatgagccttgaaaaaacaggcgatctatttgcaattagaccaagtaagagcttggttattggccgcttagagaagaatccggataaacttgatagtatttatcagcttggtatgaaagatgctaaaagtgggatgcctgagctgaatagttatctaatgaaa

SEQ ID NO: 1091 - DNA, 846 bp, Streptococcus agalactiae; identical to SEQ ID NO: 1090

SEQ ID NO: 1092 - DNA, 846 bp, Streptococcus agalactiae; identical to SEQ ID NO: 1089

SEQ ID NO: 1093 - DNA, 846 bp, Streptococcus agalactiae
cctatgttgtctgttggtttagttttagagggtggcggaatgagaggtctttatactgctggagttttagatgcttttctagatgcaggaataaaaatagatggtatcgtatctgtctctgcgggtgcattgtttggtgttaattttgtatctagacaacgagagagggctttgcgatacaataaaaagtatttatcccaccctgaatatatgagtctaagatcatggcttcgaacagggaattttgttaataaagatttcacctattatgaagttcctatgaaattggatgtatttgacgatgaagcatttaaaaaatcaagtattgatttttacgtagttgctacagagatgacatctggtaaacctgaatattttaaaattgatagtgtttttgaacaaatggaaattttacgtgctagttcagcattaccagtagtctcaaagatggttgattggcaggggaaaaagtacttagatggtggtttatctgatagtattcccgttgattttgcccgtggtttaggatttgacaagttgattgttgtgatgactaggccgctcaattatcagaaaaagccttcaagtggacgattgtataaaactctgtataggaaatatcctaattttgtaaagacagcctcgaatcggtaccaacagtataataatagtcttgaaaaggtcatgagccttgaaaaaacaggcgatctatttgcaattagaccgagtaagagcttggttattggccgcttagagaagaatccggataaacttgatagtatttatcagcttggtatgaaatatgctaaaagtgtgatgcctgagctgaatagttatctaatgaaa

SEQ ID NO: 1094 - DNA, 846 bp, Streptococcus agalactiae; identical to SEQ ID NO: 1093

SEQ ID NO: 1095 - DNA, 846 bp, Streptococcus agalactiae; identical to SEQ ID NO: 1093

SEQ ID NO: 1096 - DNA, 846 bp, Streptococcus agalactiae; identical to SEQ ID NO: 1089

SEQ ID NO: 1097 - DNA, 846 bp, Streptococcus agalactiae
cctatgttgtctgttggtttagttttagagggtggcggaatgagaggtctttatactgctggagttttagatgcttttctagatgcaggaataaaaatagatggtatcgtatctgtctctgcgggtgcattgtttggtgttaattttgtatctagacaacgagagagggctttgcgatacaataaaaagtatttatcccaccctaaatatatgagtctaagatcatggcttcgaacagggaattttgttaataaagatttcacctattatgaagttcctatgaaattggatgtatttgacgatgaagcatttaaaaaatcaagtattgatttttacgcagttgctacagagatgacatctggtaaacctgaatattttaaaattgatagtgtctttgaacaaatggaaattttacgtgctagttcagcattaccagtagtctcaaagatggttgattggcaggggaaaaagtacttagatggtggtttatctgatagtatccccgttgattttgcccgtggtttaggatttgacaagttgattgttgtgatgactaggccgctcaattatcagaaaaagccttcaagtggacgattgtataaaactctgtataggaaatatcctaattttgtaaagacagcctcgaatcggtaccaacagtataataatagccttgaaaaggtcatgagccttgaaaaaacaggcgatctatttgcaattaggccgagtaaaagcttggttattgtccgcttagagaagaatccggataaacttgatagtatttatcagcttggtatgaaagatgctaaaagtgtgatgcctgagctgaatagttatctaatgaaa

SEQ ID NO: 1098 - DNA, 846 bp, Streptococcus agalactiae; identical to SEQ ID NO: 1090

SEQ ID NO: 1099 - protein, 282 aa, Streptococcus agalactiae
PMLSVGLVLEGGGMRGLYTAGVLDAFLDAGIKIDGIVSVSAGALFGVNFVSRQRERALRYNKKYLSHPKYMSLRSWFRTGNFVNKDFTYYEVPMKLDVFDDEAFKKSSIDFYVVATEMTSGKPEYFKIDSVFEQMEILRASSALPVVSKMVDWQGKKYLDGGLSDSIPVDFARGLGFDKLIVVMTRPLNYQKKPSSGRLYKTLYRKYPNFVKTASNRYQQYNNSLEKVMSLEKTGDLFAIRPSKSLVIGRLEKNPDKLDSIYQLGMKDAKSVMPELNSYLMK

SEQ ID NO: 1100 - protein, 282 aa, Streptococcus agalactiae; identical to SEQ ID NO: 1099

SEQ ID NO: 1101 - protein, 282 aa, Streptococcus agalactiae
PMLSVGLVLEGGGMRGLYTAGVLDAFLDAGIKVDGIISVSAGALFGVNFVSRQRERALRYNKKYLSHPKYMSLRSWLRTGNFVNKDFTYYEVPMKLDVFDDEAFKKSSIDFYAVATEMTSGKPEYFKIDSVFEQMEILRASSALPVVSKMVVWQGKKYLDGGLSDSIPVDFARGLGFDKLIVVMTRPLNYQKKPSSGRLYKTLYRKYPNFVKTASNRYQQYNNSLEKVMSLEKTGDLFAIRPSKSLVIGRLEKNPDKLDSIYQLGMKDAKSGMPELNSYLMK

SEQ ID NO: 1102 - protein, 282 aa, Streptococcus agalactiae; identical to SEQ ID NO: 1101

SEQ ID NO: 1103 - protein, 282 aa, Streptococcus agalactiae; identical to SEQ ID NO: 1099

SEQ ID NO: 1104 - protein, 282 aa, Streptococcus agalactiae
PMLSVGLVLEGGGMRGLYTAGVLDAFLDAGIKIDGIVSVSAGALFGVNFVSRQRERALRYNKKYLSHPEYMSLRSWLRTGNFVNKDFTYYEVPMKLDVFDDEAFKKSSIDFYVVATEMTSGKPEYFKIDSVFEQMEILRASSALPVVSKMVDWQGKKYLDGGLSDSIPVDFARGLGFDKLIVVMTRPLNYQKKPSSGRLYKTLYRKYPNFVKTASNRYQQYNNSLEKVMSLEKTGDLFAIRPSKSLVIGRLEKNPDKLDSIYQLGMKYAKSVMPELNSYLMK

SEQ ID NO: 1105 - protein, 282 aa, Streptococcus agalactiae; identical to SEQ ID NO: 1104

SEQ ID NO: 1106 - protein, 282 aa, Streptococcus agalactiae; identical to SEQ ID NO: 1104

SEQ ID NO: 1107 - protein, 282 aa, Streptococcus agalactiae; identical to SEQ ID NO: 1099

SEQ ID NO: 1108 - protein, 282 aa, Streptococcus agalactiae; identical to SEQ ID NO: 1101

SEQ ID NO: 1109 - protein, 282 aa, Streptococcus agalactiae
PMLSVGLVLEGGGMRGLYTAGVLDAFLDAGIKIDGIVSVSAGALFGVNFVSRQRERALRYNKKYLSHPKYMSLRSWLRTGNFVNKDFTYYEVPMKLDVFDDEAFKKSSIDFYAVATEMTSGKPEYFKIDSVFEQMEILRASSALPVVSKMVDWQGKKYLDGGLSDSIPVDFARGLGFDKLIVVMTRPLNYQKKPSSGRLYKTLYRKYPNFVKTASNRYQQYNNSLEKVMSLEKTGDLFAIRPSKSLVIVRLEKNPDKLDSIYQLGMKDAKSVMPELNSYLMK

SEQ ID NO: 1110 - DNA, 732 bp, Streptococcus agalactiae
atgaaagttttagtagttgatgatgaaccagttgcacgtaacgaattaatttaccttcttaataagtatgattctaacctcgttatagcagaggcgcatgatatggctactgcattagctattttacttagagaaacttttgatgtagcactgttagatatccatctcagagatgattctgggttgcaattagcagagtatatcaataaaatgcccaaaccaccattattgatatttgcgactgcttatgatcaatatgctattcaggcttttgagcatgatgcgcgtgattatttgttaaaaccctatgattttgataggctaaagcaagctatggatagagtaaaaggagcgctaagtacatctacaattatagagagcgtaacttccggtcctctcttcaagcaacagtatccattgacagtagaagatcgaatctatctggtgtcggcggatgatatccttttgattgaagctatgcaaggaaaactgattatacaaacacctgataaaaattatgaaattgatggctctctacaacaatggcaagataaactaccatcatctcaatttgtacgggtacatcgctcttacattgtgaacattaatgctattaaaacgattgaaccttggtttaaccaaacacttcagttacacctttgtaataaaataacagttcctgttagcagagcaaatgtaaaacccctaaaacaaatgttaggcatatctacc

SEQ ID NO: 1111 - DNA, 729 bp, Streptococcus agalactiae
aaagttttagtagttgatgatgaaccagttgcacgtaacgaattaatttaccttcttaataagtatgattctaacctcgttatagcagaggcgcatgatatggctactgcattagctattttacttagagaaacttttgatgtagcactgttagatatccatctcagagatgattctgggttgcaattagcagagtatatcaataaaatgcccaaaccaccattattgatatttgcgactgcttatgatcaatatgctattcaggcttttgagcatgatgcgcgtgattatttgttaaaaccctatgattttgataggctaaagcaagctatggatagagtaaaaggagcgctaagtacatctacaattatagagagcgtaacttccggtcctctcttcaagcaacagtatccattgacagtagaagatcgaatctatctggtgtcggcggatgatatccttttgattgaagctatgcaaggaaaactgattatacaaacacctgataaaaattatgaaattgatggctctctacaacaatggcaagataaactaccatcatctcaatttgtacgggtacatcgctcttacattgtgaacattaatgctattaaaacgattgaaccttggtttaaccaaacacttcagttacacctttgtaataaaataacagttcctgttagcagagcaaatgtaaaacccctaaaacaaatgttaggcatatctacc

SEQ ID NO: 1112 - DNA, 729 bp, Streptococcus agalactiae
aaagttttagtagttgatgatgaaccagttgcacgtaacgaattaatttaccttcttaataagtatgattctaacctcgttatagcagaggcgcatgatatggctactgcattagctattttacttagagaaacttttgatgtagcactgttagatatccatctcagagatgattctgggttgcaattagcagagtatatcaataaaatgcccaaaccaccattattgatattcgcgactgcttatgatcaatatgctattcaagcttttgagcatgatgcgcgtgattatttgttaaaaccctatgagtttgataggctaaagcaagctatggatagagtaaaaggagcgctaagtacatctacaattatagagagcgtaacttccggccctctcttcaagcaacagtatccattgacagtagaagatcgaatctatctggtgtcggcggatgatatccttttgattgaagctatgcaaggaaaactgattatacaaacacctgataaaaattatgaaattgatggctctctacaacaatggcaagataaactaccatcatctcaatttgtacgggtgcaccgctcttacattgtgaatattaatgctattaaaacgattgaaccttggtttaaccaaacacttcagttacacctttgtaataaaataacagttcctgttagcagagcaaatgtaaaacccctaaaacaaatgttaggcatatctacc

SEQ ID NO: 1113 - DNA, 729 bp, Streptococcus agalactiae; identical to SEQ ID NO: 1112

SEQ ID NO: 1114 - DNA, 729 bp, Streptococcus agalactiae; identical to SEQ ID NO: 1111

SEQ ID NO: 1115 - DNA, 729 bp, Streptococcus agalactiae
aaagttttagtagttgatgatgaaccagttgcacgtaacgaattaatttaccttcttaataagtatgattctaacctcgttatagcagaggcgcatgatatggctactgcattagctattttacttagagaaacttttgatgtagcactgttagatatccatctcagagatgattctgggttgcaattagcagagtatatcaataaaatgcccaaaccaccattattgatattcgcgactgcttatgatcaatatgctattcaggcttttgagcaggatgcgcgtgattatttgttaaaaccctatgagtttgataggttaaagcaagctatggatagagtaaaaggagcgctaagtacatctacaattatagagagcgtagcttccggtcctctcttcaagcaacagtatccattgacagtagaagatcgaatctatctggtgtcggcggatgatatccttttgattgaagctatgcaaggaaaactgattatacaaacacctgataaaaattatgaaattgatggctctctacaacaatggcaagataaactaccatcatctcaatttgtacgggtacatcgctcttacattgtgaatattaatgctattaaaacgattgaaccttggtttaaccaaacacttcagttacacctttgtaataaaataacagttcctgttagcagagcaaatgtaaaacccctaaaacaaatgttaggcatatctacc

SEQ ID NO: 1116 - DNA, 729 bp, Streptococcus agalactiae; identical to SEQ ID NO: 1115

SEQ ID NO: 1117 - DNA, 729 bp, Streptococcus agalactiae; identical to SEQ ID NO: 1115

SEQ ID NO: 1118 - DNA, 665 bp, Streptococcus agalactiae
  misc_feature 275, 376: n = A,T,C or G
cttaataagtatgattctaacctcgttatagcagaggcgcatgatatggctactgcattagctattttacttagagaaacttttgatgtagcactgttagatatccatctcagagatgattctgggttgcaattagcagagtatatcaataaaatgcccaaaccaccattattgatattcgcgactgcttatgatcaatatgctattcaagcttttgagcatgatgcgcgtgattatttgttaaaaccctatgagtttgataggctaaagcaagntatggatagagtaaaaggagcgctaagtacatctacaattatagagagcgtaacttccggccctctcttcaagcaacagtatccattgacagtagaagatngaatctatctggtgtcggcggatgatatccttttgattgaagctatgcaaggaaaactgattatacaaacacctgataaaaattatgaaattgatggctctctacaacaatggcaagataaactaccatcatctcaatttgtacgggtgcaccgctcttacattgtgaatattaatgctattaaaacgattgaaccttggtttaaccaaacacttcagttacacctttgtaataaaataacagttcctgttagcagagcaaatgtaaaacccctaaaacaaatgttagg

SEQ ID NO: 1119 - DNA, 729 bp, Streptococcus agalactiae
aaagttttagtagttgatgatgaaccagttgcacgtaacgaattaatttatcttcttaataagtatgattctaacctcgttatagcagaggcgcatgatatagctactgcattagctattttacttagagaaacttttgatgtagcactgttagatatccatctcagagatgattctgggttgcaattagcagagtatatcaataaaatgcccaaaccaccattattgatattcgcgactgcttatgatcaatatgctattcaggcttttgagcatgatgcgcgtgattatttgttaaaaccctatgagtttgataggctaaagcaagctatggatagagtaaaaggagcgctaagtacatctacaattatagagagcgtaacttccggccctctcttcaagcaacagtatccattgacagtagaagatcgaatctatctggtgtcggcggatgatatccttttgattgaagctatgcaaggaaaactgattatacaaacacctgataaaaattatgaaattgatggctctctacaacaatggcaagataaactaccatcatctcaatttgtacgggtgcaccgctcttacattgtgaatattaatgctattaaaacgattgaaccttggtttaaccaaacacttcagttacacctttgtaataaaataacagttcctgttagcagagcaaatgtaaaacccctaaaacaaatgttaggcatatctacc

SEQ ID NO: 1120 - DNA, 729 bp, Streptococcus agalactiae; identical to SEQ ID NO: 1112

SEQ ID NO: 1121 - protein, 243 aa, Streptococcus agalactiae
KVLVVDDEPVARNELIYLLNKYDSNLVIAEAHDMATALAILLRETFDVALLDIHLRDDSGLQLAEYINKMPKPPLLIFATAYDQYAIQAFEHDARDYLLKPYDFDRLKQAMDRVKGALSTSTIIESVTSGPLFKQQYPLTVEDRIYLVSADDILLIEAMQGKLIIQTPDKNYEIDGSLQQWQDKLPSSQFVRVHRSYIVNINAIKTIEPWFNQTLQLHLCNKITVPVSRANVKPLKQMLGIST

SEQ ID NO: 1122 - protein, 243 aa, Streptococcus agalactiae; identical to SEQ ID NO: 1121

SEQ ID NO: 1123 - protein, 243 aa, Streptococcus agalactiae
KVLVVDDEPVARNELIYLLNKYDSNLVIAEAHDMATALAILLRETFDVALLDIHLRDDSGLQLAEYINKMPKPPLLIFATAYDQYAIQAFEHDARDYLLKPYEFDRLKQAMDRVKGALSTSTIIESVTSGPLFKQQYPLTVEDRIYLVSADDILLIEAMQGKLIIQTPDKNYEIDGSLQQWQDKLPSSQFVRVHRSYIVNINAIKTIEPWFNQTLQLHLCNKITVPVSRANVKPLKQMLGIST

SEQ ID NO: 1124 - protein, 243 aa, Streptococcus agalactiae; identical to SEQ ID NO: 1123

SEQ ID NO: 1125 - protein, 243 aa, Streptococcus agalactiae; identical to SEQ ID NO: 1121

SEQ ID NO: 1126 - protein, 243 aa, Streptococcus agalactiae
KVLVVDDEPVARNELIYLLNKYDSNLVIAEAHDMATALAILLRETFDVALLDIHLRDDSGLQLAEYINKMPKPPLLIFATAYDQYAIQAFEQDARDYLLKPYEFDRLKQAMDRVKGALSTSTIIESVASGPLFKQQYPLTVEDRIYLVSADDILLIEAMQGKLIIQTPDKNYEIDGSLQQWQDKLPSSQFVRVHRSYIVNINAIKTIEPWFNQTLQLHLCNKITVPVSRANVKPLKQMLGIST

SEQ ID NO: 1127 - protein, 243 aa, Streptococcus agalactiae; identical to SEQ ID NO: 1126

SEQ ID NO: 1128 - protein, 243 aa, Streptococcus agalactiae; identical to SEQ ID NO: 1126

SEQ ID NO: 1129 - protein, 221 aa, Streptococcus agalactiae
  VARIANT 92, 126: Xaa = Any Amino Acid
LNKYDSNLVIAEAHDMATALAILLRETFDVALLDIHLRDDSGLQLAEYINKMPKPPLLIFATAYDQYAIQAFEHDARDYLLKPYEFDRLKQXMDRVKGALSTSTIIESVTSGPLFKQQYPLTVEDXIYLVSADDILLIEAMQGKLIIQTPDKNYEIDGSLQQWQDKLPSSQFVRVHRSYIVNINAIKTIEPWFNQTLQLHLCNKITVPVSRANVKPLKQML

SEQ ID NO: 1130 - protein, 243 aa, Streptococcus agalactiae
KVLVVDDEPVARNELIYLLNKYDSNLVIAEAHDIATALAILLRETFDVALLDIHLRDDSGLQLAEYINKMPKPPLLIFATAYDQYAIQAFEHDARDYLLKPYEFDRLKQAMDRVKGALSTSTIIESVTSGPLFKQQYPLTVEDRIYLVSADDILLIEAMQGKLIIQTPDKNYEIDGSLQQWQDKLPSSQFVRVHRSYIVNINAIKTIEPWFNQTLQLHLCNKITVPVSRANVKPLKQMLGIST

SEQ ID NO: 1131 - protein, 243 aa, Streptococcus agalactiae; identical to SEQ ID NO: 1123

SEQ ID NO: 1132 - DNA, 840 bp, Streptococcus agalactiae
atgggaattgaatttaaaaatgtaagttatacctatcaagccggcactccttttgaagggcgtgccctttttgacgtcaatctgaaaattgaagatgcttcctataccgcgttcattgggcacacaggttctggaaaatcaactattatgcaacttttgaatggtttacatattcctacaaaaggtgaggtaattgtcgatgatttttctattaaagcaggggacaagaacaaagaaatcaaatttataaggcaaaaagttggtttagtttttcaatttccagaaagtcagctttttgaagagacagttttaaaggatgttgcttttggaccacaaaattttggtatttctcagattgaagctgaaaggctggctgaagaaaaattaaggttagttggtatcagtgaggatttattcgataaaaatccatttgaactttctggagggcagatgaggcgggttgctatagctggtattttagcgatggaacccaaagtactagtactggatgagccaacagctggacttgatcctaagggaagaaaagaattaatgactctttttaaaaatcttcataaaaaaggaatgactatcgtcttagtgactcacttaatggacgatgtagcggattatgctgactatgtgtatgttttagaagcagggaaagtaaccttatcaggacaaccaaaacagatttttcaagaagtagaacttttagaaagtaaacaattaggagttcccaaaatcaccaagtttgctcaaagactatctcataagggattaaatttacctagtttaccaattactattaacgaatttgtggaggctattaagcatgga

SEQ ID NO: 1133 - DNA, 837 bp, Streptococcus agalactiae
ggaattgaatttaaaaatgtaagttatacctatcaagccggcactccttttgaagggcgtgccctttttgacgtcaatctgaaaattgaagatgcttcctataccgcgttcattgggcacacaggttctggaaaatcaactattatgcaacttttgaatggtttacatattcctacaaaaggtgaggtaattgtcgatgatttttctattaaagcaggggacaagaacaaagaaatcaaatttataaggcaaaaagttggtttagtttttcaatttccagaaagtcagctttttgaagagacagttttaaaggatgttgcttttggaccacaaaattttggtatttctcagattgaagctgaaaggctggctgaagaaaaattaaggttagttggtatcagtgaggatttattcgataaaaatccatttgaactttctggagggcagatgaggcgggttgctatagctggtattttagcgatggaacccaaagtactagtactggatgagccaacagctggacttgatcctaagggaagaaaagaattaatgactctttttaaaaatcttcataaaaaaggaatgactatcgtcttagtgactcacttaatggacgatgtagcggattatgctgactatgtgtatgttttagaagcagggaaagtaaccttatcaggacaaccaaaacagatttttcaagaagtagaacttttagaaagtaaacaattaggagttcccaaaatcaccaagtttgctcaaagactatctcataagggattaaatttacctagtttaccaattactattaacgaatttgtggaggctattaagcatgga

SEQ ID NO: 1134 - DNA, 837 bp, Streptococcus agalactiae
ggaattgaatttaaaaatgtaagttatacctatcaagccggcactccttttgaagggcgtgccctttttgacgtcaatctgaaaattgaagatgcttcctataccgcgttcattgggcacacaggttctggaaaatcaactattatgcaacttttgaatggtttacatattcctacaaaaggtgaggtaattgtcgatgatttttctattaaagcaggggacaagaacaaagaaatcaaatttataaggcaaaaagttggtttagtttttcaatttccagaaagtcagctttttgaagagacagttttaaaagatgttgcttttggaccacaaaattttggtatttctcagattgaagctgaaaggctggctgaagaaaaattaaggttagttggtatcagtgaggatttattcgataaaaatccatttgaactttctggagggcagatgaggcgggttgctatagctggtattttagcgatggaacccaaagtactagtactagatgagccaacagctggacttgatcctaagggaagaaaagaattaatgactctttttaaaaatcttcataaaaaaggaatgactatcgtcttagtgactcacttaatggacgatgtagcggattatgctgactatgtgtatgttttagaagcagggaaagtaaccttatcaggacaaccaaagcagatttttcaagaagtagaacttttagaaagtaaacaattaggagttcccaaaatcaccaagtttgctcaaaggctatctcataagggattaaatttacctagtttaccaattactattaacgaatttgtggaggctattaagcatgga

SEQ ID NO: 1135 - DNA, 837 bp, Streptococcus agalactiae; identical to SEQ ID NO: 1134

SEQ ID NO: 1136 - DNA, 837 bp, Streptococcus agalactiae; identical to SEQ ID NO: 1133

SEQ ID NO: 1137 - DNA, 837 bp, Streptococcus agalactiae
ggaattgaatttaaaaatgtaagttatacctatcaagccggcactccttttgaagggcgtgccctttttgacgtcaatctgaaaattgaagatgtttcctataccgcgttcattgggcacacaggttctggaaaatcaactattatgcaacttttgaatggtttacatattcctacaaaaggtgaggtaattgtcgatgatttttctattaaagcaggggacaagaacaaagaaatcaaatttataaggcaaaaagttggtttagtttttcaatttccagaaagtcagctttttgaagagacagttttaaaggatgttgcttttggaccacaaaattttggtatttctcagattgaagctgaaaggctggctgaagaaaaattaaggttagttggtatcagtgaggatttattcgataaaaatccatttgaactttctggagggcagatgaggcgggttgctatagctggtattttagcgatggaacccaaagtactagtactggatgagccaacagctggacttgatcctaagggaagaaaagaattaatgactctttttaaaaatcttcataaaaaaggaatgactatcgtcttagtgactcacttaatggacgatgtagcggattatgctgactatgtgtatgttttagaagcagggaaagtaaccttatcaggacaaccaaaacagatttttcaagaagtagaacttttagaaagtaaacaattaggagttcccaaaatcaccaagtttgctcaaagactatctcataagggattaaatttacctagtttaccaattactattaacgaatttgtggaggctattaagcatgga

SEQ ID NO: 1138 - DNA, 837 bp, Streptococcus agalactiae; identical to SEQ ID NO: 1137

SEQ ID NO: 1139 - DNA, 837 bp, Streptococcus agalactiae; identical to SEQ ID NO: 1137

SEQ ID NO: 1140 - DNA, 837 bp, Streptococcus agalactiae; identical to SEQ ID NO: 1133

SEQ ID NO: 1141 - DNA, 837 bp, Streptococcus agalactiae; identical to SEQ ID NO: 1133

SEQ ID NO: 1142 - DNA, 837 bp, Streptococcus agalactiae
ggaattgaatttaaaaatgtaagttatacctatcaagccggcactccttttgaagggcgtgccctttttgacgttaatctgaaaattgaagatgcttcctataccgcattcattgggcacacaggttctggaaaatcaactattatgcaacttttgaatggtttacatattcctacaaaaggtgaggtaattgtcgatgatttttctattaaagcaggggacaagaacaaagaaatcaaatttataaggcaaaaagttggtttagtttttcaatttccagaaagtcagctttttgaagagacagttttaaaggatgttgcttttggaccacaaaattttggtatttctcagattgaagctgaaaggctggctgaagaaaaattaaggttagttggtattagtgaggatttattcgataaaaatccatttgaactttctggagggcagatgaggcgggttgctatagctggtattttagcgatggaacccaaagtactagtactggatgagccaacagctggacttgatcctaagggaagaaaagaattaatgactctttttaaaaatcttcataaaaaaggaatgactatcgtcttagtgactcacttaatggacgatgtagcggattatgctgactatgtgtatgttttagaagcagggaaagtaaccttatcaggacaaccaaaacagatttttcaagaagtagaacttttagaaagtaaacaattaggagttcccaaaatcaccaagtttgctcaaagactatctcataagggattaaatttacctagtttaccaattactattaacgaatttgtggaggctattaagcatgga

SEQ ID NO: 1143 - protein, 280 aa, Streptococcus agalactiae
MGIEFKNVSYTYQAGTPFEGRALFDVNLKIEDASYTAFIGHTGSGKSTIMQLLNGLHIPTKGEVIVDDFSIKAGDKNKEIKFIRQKVGLVFQFPESQLFEETVLKDVAFGPQNFGISQIEAERLAEEKLRLVGISEDLFDKNPFELSGGQMRRVAIAGILAMEPKVLVLDEPTAGLDPKGRKELMTLFKNLHKKGMTIVLVTHLMDDVADYADYVYVLEAGKVTLSGQPKQIFQEVELLESKQLGVPKITKFAQRLSHKGLNLPSLPITINEFVEAIKHG

SEQ ID NO: 1144 - protein, 279 aa, Streptococcus agalactiae
GIEFKNVSYTYQAGTPFEGRALFDVNLKIEDASYTAFIGHTGSGKSTIMQLLNGLHIPTKGEVIVDDFSIKAGDKNKEIKFIRQKVGLVFQFPESQLFEETVLKDVAFGPQNFGISQIEAERLAEEKLRLVGISEDLFDKNPFELSGGQMRRVAIAGILAMEPKVLVLDEPTAGLDPKGRKELMTLFKNLHKKGMTIVLVTHLMDDVADYADYVYVLEAGKVTLSGQPKQIFQEVELLESKQLGVPKITKFAQRLSHKGLNLPSLPITINEFVEAIKHG

SEQ ID NO: 1145 - protein, 279 aa, Streptococcus agalactiae; identical to SEQ ID NO: 1144

SEQ ID NO: 1146 - protein, 279 aa, Streptococcus agalactiae; identical to SEQ ID NO: 1144

SEQ ID NO: 1147 - protein, 279 aa, Streptococcus agalactiae; identical to SEQ ID NO: 1144

SEQ ID NO: 1148 - protein, 279 aa, Streptococcus agalactiae
GIEFKNVSYTYQAGTPFEGRALFDVNLKIEDVSYTAFIGHTGSGKSTIMQLLNGLHIPTKGEVIVDDFSIKAGDKNKEIKFIRQKVGLVFQFPESQLFEETVLKDVAFGPQNFGISQIEAERLAEEKLRLVGISEDLFDKNPFELSGGQMRRVAIAGILAMEPKVLVLDEPTAGLDPKGRKELMTLFKNLHKKGMTIVLVTHLMDDVADYADYVYVLEAGKVTLSGQPKQIFQEVELLESKQLGVPKITKFAQRLSHKGLNLPSLPITINEFVEAIKHG

SEQ ID NO: 1149 - protein, 279 aa, Streptococcus agalactiae; identical to SEQ ID NO: 1148

SEQ ID NO: 1150 - protein, 279 aa, Streptococcus agalactiae; identical to SEQ ID NO: 1148

SEQ ID NO: 1151 - protein, 279 aa, Streptococcus agalactiae; identical to SEQ ID NO: 1144

SEQ ID NO: 1152 - protein, 279 aa, Streptococcus agalactiae; identical to SEQ ID NO: 1144

SEQ ID NO: 1153 - protein, 279 aa, Streptococcus agalactiae; identical to SEQ ID NO: 1144

SEQ ID NO: 1154 - DNA, 456 bp, Streptococcus agalactiae
gtgaaccacttacttaacctcagtaaagaaaatatagctaaaatagattttgactttcttaatgaggcacttaatgcaaatattcgtttgaaagaattagtagatgaactaaaaatttcaaaagaactggacagtaaaggttggtccaaaaaagactctcgaacgataaaaatcttgtacgatggccttatcaataaacatatagtttccctagatcgtgcagattataacattatccaagtcattccatttgctaatgtacatgtactactgtttttaataccagaaagggagaattctaaaaattatagaatatacaactacagtgattatgaaatggagttaatcaatgaggataggcaacaattttcaaaatatgaaacagttgatttagaccaattgatacttgttgatatttttaatattgatgactacatttcatcatatttaacaata

SEQ ID NO: 1155 - DNA, 453 bp, Streptococcus agalactiae
aaccacttacttaacctcagtaaagaaaatatagctaaaatagattttgactttcttaatgaggcacttaatgcaaatattcgtttgaaagaattagtagatgaactaaaaatttcaaaagaactggacagtaaaggttggtccaaaaaagactctcgaacgataaaaatcttgtacgatggccttatcaataaacatatagtttccctagatcgtgcagattataacattatccaagtcattccatttgctaatgtacatgtactactgtttttaataccagaaagggagaattctaaaaattatagaatatacaactacagtgattatgaaatggagttaatcaatgaggataggcaacaattttcaaaatatgaaacagttgatttagaccaattgatacttgttgatatttttaatattgatgactacatttcatcatatttaacaata

SEQ ID NO: 1156 - DNA, 453 bp, Streptococcus agalactiae; identical to SEQ ID NO: 1155

SEQ ID NO: 1157 - protein, 152 aa, Streptococcus agalactiae
VNHLLNLSKENIAKIDFDFLNEALNANIRLKELVDELKISKELDSKGWSKKDSRTIKILYDGLINKHIVSLDRADYNIIQVIPFANVHVLLFLIPERENSKNYRIYNYSDYEMELINEDRQQFSKYETVDLDQLILVDIFNIDDYISSYLTI

SEQ ID NO: 1158 - protein, 151 aa, Streptococcus agalactiae
NHLLNLSKENIAKIDFDFLNEALNANIRLKELVDELKISKELDSKGWSKKDSRTIKILYDGLINKHIVSLDRADYNIIQVIPFANVHVLLFLIPERENSKNYRIYNYSDYEMELINEDRQQFSKYETVDLDQLILVDIFNIDDYISSYLTI

SEQ ID NO: 1159 - protein, 151 aa, Streptococcus agalactiae; identical to SEQ ID NO: 1158

SEQ ID NO: 1160 - DNA, 366 bp, Streptococcus agalactiae
agcaagcctaatgttgttcagttaaataatcaatatattaacgatgagaatctaaaaaaacgttacgaagctgaggagttacgccgaaaaaatcgtttaatgggttgggttcttatttttgtcatgcttttatttattttacccacttataatttagttaagagttacagaactttacaagaacgtcgtcaagaagttgtaaaattaacgaaagactatcagacattaactaatagaactgagaaccagaagttgctagcaaaacaactaaaaaatccagattacgttcaaaaatatgctcgagctaagtattatttctctaagaccggcgaaatgatttacccattaccagaccttttaccaaaa

SEQ ID NO: 1161 - DNA, 356 bp, Streptococcus agalactiae
agcaagcctaatgttgttcagttaaataatcaatatattaacgatgagaatctaaaaaaacgttacgaagctgaggagttacgccgaaaaaatcgtttaatgggttgggttcttatttttgtcatgcttttatttattttacccacttataatttagttaagagttacagaactttacaagaacgtcgtcaagaagttgtaaaattaacgaaagactatcagacattaactaatagaactgagaaccagaagttactagcaaaacaactaaaaaatccagattacgttcaaaaatatgctcgagctaagtattatttctctaagaccggcgaaatgatttacccattaccagacct

SEQ ID NO: 1162 - DNA, 366 bp, Streptococcus agalactiae
agcaagcctaatgttgttcagttaaataatcaatatattaacgatgagaatctaaaaaaacgttacgaagctgaggagttacgccgaaaaaatcgtttaatgggttgggttcttatttttgtcatgcttttatttattttacccacttataatttagttaagagttacagaactttacaagaacgtcgtcaagaagttgtaaaattaacgaaagactatcagacattaactaatagaactgagaaccagaagttactagcaaaacaactaaaaaatccagattacgttcaaaaatatgctcgagctaagtattatttctctaagaccggcgaaatgatttacccattaccagaccttttaccaaaa

SEQ ID NO: 1163 - DNA, 366 bp, Streptococcus agalactiae; identical to SEQ ID NO: 1160

SEQ ID NO: 1164 - DNA, 366 bp, Streptococcus agalactiae
agcaagcctaatgttgttcagttaaataatcaatatattaacgatgagaatctaaaaaaacgttacgaagctgaggagttacgccgaaaaaatcgtttaatgggttgggttcttatttttgtcatgcttttatttattttacccacttataatttagttaagagttacagaactttacaagaacgtcgtcaagaagttgtaaaattaacgaaagactatcagacattaactaatagaactgagaaccagaagttactagcaaaacaactaaaaaatccagattacgttcaaaaatatgctcgagcgaagtattatttctctaagaccggcgaaatgatttacccattaccagaccttttaccaaaa

SEQ ID NO: 1165 - DNA, 366 bp, Streptococcus agalactiae; identical to SEQ ID NO: 1164

SEQ ID NO: 1166 - DNA, 366 bp, Streptococcus agalactiae; identical to SEQ ID NO: 1164

SEQ ID NO: 1167 - DNA, 366 bp, Streptococcus agalactiae; identical to SEQ ID NO: 1160

SEQ ID NO: 1168 - DNA, 366 bp, Streptococcus agalactiae; identical to SEQ ID NO: 1162

SEQ ID NO: 1169 - DNA, 366 bp, Streptococcus agalactiae
agcaagcctaatgttgttcagttaaataatcaatatattaacgatgagaatctaaaaaaacgttacgaagctgaggagttacgccgaaaaaatcgtttaatgggttgggttcttatttttgtcatgcttttatttattttacccacttataatttagttaagagttacagaactttacaagaacgtcgtcaagaagttgtaaaattaacgaaagactatcagacattaactaatagaactgagaaccagaagttactagcaaaacaactaaaaaatccagattacgttcaaaaatatgctcgagcgaagtattatttctctaagactggcgaaatgatttacccattaccagaccttttaccaaaa

SEQ ID NO: 1170 - DNA, 366 bp, Streptococcus agalactiae; identical to SEQ ID NO: 1160

SEQ ID NO: 1171 - protein, 122 aa, Streptococcus agalactiae
SKPNVVQLNNQYINDENLKKRYEAEELRRKNRLMGWVLIFVMLLFILPTYNLVKSYRTLQERRQEVVKLTKDYQTLTNRTENQKLLAKQLKNPDYVQKYARAKYYFSKTGEMIYPLPDLLPK

SEQ ID NO: 1172 - protein, 118 aa, Streptococcus agalactiae
SKPNVVQLNNQYINDENLKKRYEAEELRRKNRLMGWVLIFVMLLFILPTYNLVKSYRTLQERRQEVVKLTKDYQTLTNRTENQKLLAKQLKNPDYVQKYARAKYYFSKTGEMIYPLPD

SEQ ID NO: 1173 - protein, 122 aa, Streptococcus agalactiae; identical to SEQ ID NO: 1171

SEQ ID NO: 1174 - protein, 122 aa, Streptococcus agalactiae; identical to SEQ ID NO: 1171

SEQ ID NO: 1175 - protein, 122 aa, Streptococcus agalactiae; identical to SEQ ID NO: 1171

SEQ ID NO: 1176 - protein, 122 aa, Streptococcus agalactiae; identical to SEQ ID NO: 1171

SEQ ID NO: 1177 - protein, 122 aa, Streptococcus agalactiae; identical to SEQ ID NO: 1171

SEQ ID NO: 1178 - protein, 122 aa, Streptococcus agalactiae; identical to SEQ ID NO: 1171

SEQ ID NO: 1179 - protein, 122 aa, Streptococcus agalactiae; identical to SEQ ID NO: 1171

SEQ ID NO: 1180 - protein, 122 aa, Streptococcus agalactiae; identical to SEQ ID NO: 1171

SEQ ID NO: 1181 - protein, 122 aa, Streptococcus agalactiae; identical to SEQ ID NO: 1171

SEQ ID NO: 1182 - DNA, 456 bp, Streptococcus agalactiae
atgaaaaatttattgttaaaatgtaaggataagaaggttaaagcatttacacttttagaatgtttggtagcattggttacaatcacaggagctttactagtttatcaaggactgacaaaattgttggctcaacagatagtagtgatgtcttcttccagtcagtctgaatgggtgttattaactcagcaactaaatgcagaatttgaaggcgctcatctggaatatttaagacagaacaaactttatttacgtaagcaagataagattgtaacctttggcaaatctaataaagatgatttccgtaagacaggttatgatggtcgaggttatcaaccaatggtttatgggttagacaattgtcaaatgagtcagaccaaaagtatggtaaaacttgttttttattttaaggacgggttaaaaaggacattttactatgattttaaagaagaaacttaa

SEQ ID NO: 1183 - DNA, 254 bp, Streptococcus agalactiae
aattcgaaggcgctcacttggaatatttaagacagaacaaactttatttacgtaagcaagataagattgtaacctttggcaaatctaataaagatgatttccgtaagacaggttatgatggtcgaggttatcaaccaatggtttatgggttagacaattgtcaaatgagtcaaaccaaaagtatggtaaaacttgttttttattttaaggacgggttaaaaaggacattttactatgattttaaagaagaaact

SEQ ID NO: 1184 - DNA, 257 bp, Streptococcus agalactiae
cagaatttgaaggcgctcatctggaatatttaagacagaacaaactttatttacgtaagcaagataagattgtaacctttggcaaatctaataaagatgatttccgtaagacaggttatgatggtcgaggttatcaaccaatggtttatgggttagacaattgtcaaatgagtcagaccaaaagtatggtaaaacttgttttttattttaaggacgggttaaaaaggacattttactatgattttaaagaagaaact

SEQ ID NO: 1185 - DNA, 260 bp, Streptococcus agalactiae
atgcagaatttgaaggcgctcatctggaatatttaagacagaacaaactttatttacgtaagcaagataagattgtaacctttggcaaatctaataaagatgatttccgtaagacaggttatgatggtcgaggttatcaaccaatggtttatgggttagacaattgtcaaatgagtcagaccaaaagtatggtaaaacttgttttttattttaaggacgggttaaaaaggacattttactatgattttaaagaagaaact

SEQ ID NO: 1186 - DNA, 256 bp, Streptococcus agalactiae
agaatttgaaggcgctcatctggaatatttaagacagaacaaactttatttacgtaagcaagataagattgtaacctttggcaaatctaataaagatgatttccgtaagacaggttatgatggtcgaggttatcaaccaatggtttatgggttagacaattgtcaaatgagtcagaccaaaagtatggtaaaacttgttttttattttaaggacgggttaaaaaggacattttactatgattttaaagaagaaact

SEQ ID NO: 1187 - DNA, 257 bp, Streptococcus agalactiae
cagaattcgaaggcgctcacttggaatatttaagacagaacaaactttatttacgtaagcaagataagattgtaacctttggcaaatctaataaagatgatttccgtaagacaggttataatggtcgaggttatcaaccaatggtttatgggttagacaattgtcaaatgagtcagaccaaaagtatggtaaaacttgttttttattttaaggacgggttaaaaaggacattttactatgattttaaagaagaaact

SEQ ID NO: 1188 - DNA, 255 bp, Streptococcus agalactiae
gaattcgaaggcgctcacttggaatatttaagacagaacaaactttatttacgtaagcaagataagattgtaacctttggcaaatctaataaagatgatttccgtaagacaggttataatggtcgaggttatcaaccaatggtttatgggttagacaattgtcaaatgagtcagaccaaaagtatggtaaaacttgttttttattttaaggacgggttaaaaaggacattttactatgattttaaagaagaaact

SEQ ID NO: 1189 - DNA, 256 bp, Streptococcus agalactiae
agaattcgaaggcgctcacttggaatatttaagacagaacaaactttatttacgtaagcaagataagattgtaacctttggcaaatctaataaagatgatttccgtaagacaggttataatggtcgaggttatcaaccaatggtttatgggttagacaattgtcaaatgagtcagaccaaaagtatggtaaaacttgttttttattttaaggacgggttaaaaaggacattttactatgattttaaagaagaaact

SEQ ID NO: 1190 - DNA, 255 bp, Streptococcus agalactiae
gaattcgaaggcgctcacttggaatatttaagacagaacaaactttatttacgtaagcaagataagattgtaacctttggcaaatctaataaagatgatttccgtaagacaggttatgatggtcgaggttatcaaccaatggtttatgggttagacaattgtcaaatgagtcaaaccaaaagtatggtaaaacttgttttttattttaaggacgggttaaaaaggacattttactatgattttaaagaagaaact

SEQ ID NO: 1191 - DNA, 251 bp, Streptococcus agalactiae
tcgaaggcgctcacttggaatatttaagacagaacaaactttatttacgtaagcaagataagattgtaacctttggcaaatctaataaagatgattttcgtaagacaggttatgatggtcgaggttatcaaccaatggtttatgggttagacaattgtcaaatgagtcaaaccaaaagtatggtaaaacttgttttttattttaaggacgggttaaaaaggacattttactatgattttaaagaagaaact

SEQ ID NO: 1192 - DNA, 259 bp, Streptococcus agalactiae
tgcagaatttgaaggcgctcatctggaatatttaagacagaacaaactttatttacgtaagcaagataagattgtaacctttggcaaatctaataaagatgatttccgtaagacaggttatgatggtcgaggttatcaaccaatggtttatgggttagacaattgtcaaatgagtcagaccaaaagtatggtaaaacttgttttttattttaaggacgggttaaaaaggacattttactatgattttaaagaagaaact

SEQ ID NO: 1193 - protein, 152 aa, Streptococcus agalactiae
  VARIANT 152: Xaa = Any Amino Acid
MKNLLLKCKDKKVKAFTLLECLVALVTITGALLVYQGLTKLLAQQIVVMSSSSQSEWVLLTQQLNAEFEGAHLEYLRQNKLYLRKQDKIVTFGKSNKDDFRKTGYDGRGYQPMVYGLDNCQMSQTKSMVKLVFYFKDGLKRTFYYDFKEETX

SEQ ID NO: 1194 - protein, 84 aa, Streptococcus agalactiae
FEGAHLEYLRQNKLYLRKQDKIVTFGKSNKDDFRKTGYDGRGYQPMVYGLDNCQMSQTKSMVKLVFYFKDGLKRTFYYDFKEET

SEQ ID NO: 1195 - protein, 85 aa, Streptococcus agalactiae
EFEGAHLEYLRQNKLYLRKQDKIVTFGKSNKDDFRKTGYDGRGYQPMVYGLDNCQMSQTKSMVKLVFYFKDGLKRTFYYDFKEET

SEQ ID NO: 1196 - protein, 86 aa, Streptococcus agalactiae
AEFEGAHLEYLRQNKLYLRKQDKIVTFGKSNKDDFRKTGYDGRGYQPMVYGLDNCQMSQTKSMVKLVFYFKDGLKRTFYYDFKEET

SEQ ID NO: 1197 - protein, 85 aa, Streptococcus agalactiae; identical to SEQ ID NO: 1195

SEQ ID NO: 1198 - protein, 85 aa, Streptococcus agalactiae
EFEGAHLEYLRQNKLYLRKQDKIVTFGKSNKDDFRKTGYNGRGYQPMVYGLDNCQMSQTKSMVKLVFYFKDGLKRTFYYDFKEET

SEQ ID NO: 1199 - protein, 85 aa, Streptococcus agalactiae; identical to SEQ ID NO: 1198

SEQ ID NO: 1200 - protein, 85 aa, Streptococcus agalactiae; identical to SEQ ID NO: 1198

SEQ ID NO: 1201 - protein, 85 aa, Streptococcus agalactiae; identical to SEQ ID NO: 1195

SEQ ID NO: 1202 - protein, 83 aa, Streptococcus agalactiae
EGAHLEYLRQNKLYLRKQDKIVTFGKSNKDDFRKTGYDGRGYQPMVYGLDNCQMSQTKSMVKLVFYFKDGLKRTFYYDFKEET

SEQ ID NO: 1203 - protein, 86 aa, Streptococcus agalactiae; identical to SEQ ID NO: 1196

SEQ ID NO: 1204 - DNA, 924 bp, Streptococcus agalactiae
atgaaaaagattcgattatcaaagtttattaaaatgattgttgttattttgtttttaattagtgtagcagctagtttttattttttccacgttgcccaagttcgagatgataaatcctttatttcaaatggtcaacgtaagcctggaaactctttatatgcttatgataaatcctttgataagctattaaagcaaaaaatagaaatgacaaaccaaaatataaagcaagttgcttggtatgttcctgctgttaagaaaactcataagacagctgttgtcgttcatggttttgcgaatagcaaagagaatatgaaggcatatggttggctgtttcataagttaggatacaatgttcttatgcctgacaatattgcacatggtgaaagtcatgggcagttgataggctatggctggaacgaccgcgagaacattatcaaatggacagaaatgatagttgataagaatccatcaagccaaattactttatttggtgtttcaatgggtggagcaacagtcatgatggctagtggtgaaaaattacctagtcaggttgttaatatcattgaagattgcggttattctagtgtttgggatgaattaaaatttcaggctaaagagatgtatggtttaccagccttcccactcttatatgaagtttcaacaatttctaaaatcagagcaggtttttcgtatggacaagcaagtagtgtcgaacaattgaaaaagaataatttaccagccctctttattcatggtgataaggataattttgttccaacaagtatggtttatgacaactataaagctacagcaggtaagaaagagctttatattgtaaaaggggcaaaacatgcgaaatcttttgaaacagagccagaaaaatatgagaaacgtatctctagttttttgaaaaaatatgaaaaa

SEQ ID NO: 1205 - DNA, 855 bp, Streptococcus agalactiae
gctagtttttattttttccacgttgcccaagttcgagatgataaatcctttatttcaaatggtcaacgtaagcctggaaactctttatatgcttatgataaatcctttgataagctattaaagcaaaaaatagaaatgacaaaccaaaatataaagcaagttgcttggtatgttcctgctgctaagaaaactcataagacagctgttgtcgttcatggttttgcgaatagcaaagagaatatgaaggcatatggttggctgtttcataagttaggatacaatgttcttatgcctgacaatattgcacatggtgaaagtcatgggcagttgataggctatggctggaacgaccgcgagaacattatcaaatggacagaaatgatagttgataagaatccatcaagccaaattactttatttggtgtttcaatgggtggagcaacagtcatgatggctagtggtgaaaaattacctagtcaggttgttaatatcattgaagattgcggttattctagtgtttgggatgaattaaaatttcaggctaaagagatgtatggtttaccagccttcccactcttatatgaagtttcaacaatttctaaaatcagagcaggtttttcgtatggacaagcaagtagtgtcgaacaattgaaaaagaataatttaccagccctctttattcatggtgataaggataattttgttccaacaagtatggtttatgacaactataaagctacagcaggtaagaaagagctttatattgtaaaaggggcaaaacatgcgaaatcttttgaaacagagccagaaaaatatgagaaacgtatctctagttttttgaaaaaatatgaaaaa

SEQ ID NO: 1206 - DNA, 812 bp, Streptococcus agalactiae
aatcctttatttcaaatggtcaacgtaagcctggaaactctttatatgcttatgataaatcctttgataagctattaaagcaaaaaatagaaatgacaaaccaaaatataaagcaagttgcttggtatgttcctgctgctaagaaaactcataagacagctgttgtcgttcatggttttgcgaatagcaaagagaatatgaaggcatatggttggctgtttcataagttaggatacaatgttcttatgcctgacaacattgcacatggtgaaagtcatgggcagttgataggctatggctggaacgaccgcgagaacattatcaaatggacagaaatgatagttgataagaattcatcaagccaaattactttatttggtgtttcaatgggtggagcaacagtcatgatggctagtggtgaaaaattacctagtcaggttgttaatatcattgaagattgcggttattctggtgtttgggatgaattaaaatttcaggctaaagagatgtatggtttaccagccttcccactcttatatgaagtttcaacaatttctaaaatcagagcaggtttttcgtatggacaagcaagtagtgtcgaacaattgaaaaagaataatttaccagccctctttattcatggtgataaggataattttgttccaacaagtatggtttatgacaactataaagctacagcaggtaagaaagagctttatattgtaaaaggggcaaaacatgcgaaatcttttgaaacagagccagaaaaatatgagaaacgtatctctagttttttgaaaaaatatgaaaaa

SEQ ID NO: 1207 - DNA, 852 bp, Streptococcus agalactiae
agtttttattttttccacgttgcccaagttcgagatgataaatcctttatttcaaatggtcaacgtaagcctggaaactctttatatgcttatgataaatcctttgataagctattaaagcaaaaaatagaaatgacaaaccaaaatataaagcaagttgcttggtatgttcctgctgctaagaaaactcataagacagctgttgtcgttcatggttttgcgaatagcaaagagaatatgaaggcatatggttggctgtttcataagttaggatacaatgttcttatgcctgacaacattgcacatggtgaaagtcatgggcagttgataggctatggctggaacgaccgcgagaacattatcaaatggacagaaatgatagttgataagaattcatcaagccaaattactttatttggtgtttcaatgggtggagcaacagtcatgatggctagtggtgaaaaattacctagtcaggttgttaatatcattgaagattgcggttattctggtgtttgggatgaattaaaatttcaggctaaagagatgtatggtttaccagccttcccactcttatatgaagtttcaacaatttctaaaatcagagcaggtttttcgtatggacaagcaagtagtgtcgaacaattgaaaaagaataatttaccagccctctttattcatggtgataaggataattttgttccaacaagtatggtttatgacaactataaagctacagcaggtaagaaagagctttatattgtaaaaggggcaaaacatgcgaaatcttttgaaacagagccagaaaaatatgagaaacgtatctctagttttttgaaaaaatatgaaaaa

SEQ ID NO: 1208 - DNA, 855 bp, Streptococcus agalactiae
gctagtttttattttttccacgttgcccaagttcgagatgataaatcctttatttcaaatggtcaacgtaagcctggaaactctttatatgcttatgataaatcctttgataagctattaaagcaaaaaatagaaatgacaaaccaaaatataaagcaagttgcttggtatgttcctgctgttaagaaaactcataagacagctgttgtcgttcatggttttgcgaatagcaaagagaatatgaaggcatatggttggctgtttcataagttaggatacaatgttcttatgcctgacaatattgcacatggtgaaagtcatgggcagttgataggctatggctggaacgaccgcgagaacattatcaaatggacagaaatgatagttgataagaatccatcaagccaaattactttatttggtgtttcaatgggtggagcaacagtcatgatggctagtggtgaaaaattacctagtcaggttgttaatatcattgaagattgcggttattctagtgtttgggatgaattaaaatttcaggctaaagagatgtatggtttaccagccttcccactcttatatgaagtttcaacaatttctaaaatcagagcaggtttttcgtatggacaagcaagtagtgtcgaacaattgaaaaagaataatttaccagccctctttattcatggtgataaggataattttgttccaacaagtatggtttatgacaactataaagctacagcaggtaagaaagagctttatattgtaaaaggggcaaaacatgcgaaatcttttgaaacagagccagaaaaatatgagaaacgtatctctagttttttgaaaaaatatgaaaaa

SEQ ID NO: 1209 - DNA, 855 bp, Streptococcus agalactiae
gctagtttttattttttccacgttgcccaagttcgagatgataaatcctttatttcaaatggtcaacgtaagcctggaaactctttatatgcttatgataaatcctttgataagctattaaagcaaaaaatagaaatgacaaaccaaaatataaagcaagttgcttggtatgttcctgctgctaagaaaactcataagacagttgttgtcgttcatggttttgcgaatagcaaagagaatatgaaggcatatggttggctgtttcataagttaggatacaatgttcttatgcctgacaacattgcacatggtgaaagtcatgggcagttgataggctatggctggaacgaccgcgagaacattatcaaatggacagaaatgatagtggataagaatccatcaagccaaattactttatttggtgtttcaatgggtggagcaacagtcatgatggctagtggtgaaaaattacctagtcaggttgttaatatcattgaagattgtggttattctagtgtttgggatgaattaaaatttcaggctaaagagatgtatggtttaccagccttcccactcttatatgaagtttcaacaatttctaaaatcagagcaggtttttcgtatggacaagcaagtagtgtcgaacaattgaaaaagaataatttaccagccctctttattcatggtgataaggataattttgttccaacaagtatggtttatgacaactataaagctacagcaggtaagaaagagctttatattgtaaaaggggcaaaacatgcgaaatcttttgaaacagagccagaaaaatatgagaaacgtatctctagttttttgaaaaaatatgaaaaa

SEQ ID NO: 1210 - DNA, 855 bp, Streptococcus agalactiae; identical to SEQ ID NO: 1209

SEQ ID NO: 1211 - DNA, 855 bp, Streptococcus agalactiae; identical to SEQ ID NO: 1209

SEQ ID NO: 1212 - DNA, 855 bp, Streptococcus agalactiae; identical to SEQ ID NO: 1205

SEQ ID NO: 1213 - DNA, 855 bp, Streptococcus agalactiae
gctagtttttattttttccacgttgcccaagttcgagatgataaatcctttatttcaaatggtcaacgtaagcctggaaactctttatatgcttatgataaatcctttgataagctattaaagcaaaaaatagaaatgacaaaccaaaatataaagcaagttgcttggtatgttcctgctgctaagaaaactcataagacagctgttgtcgttcatggttttgcgaatagcaaagagaatatgaaggcatatggttggctgtttcataagttaggatacaatgttcttatacctgacaatattgcacatggtgaaagtcatgggcagttgataggctatggctggaacgaccgcgagaacattatcaaatggacagaaatgatagttgataagaatccatcaagccaaattactttatttggtgtttcaatgggtggagcaacagtcatgatggctagtggtgaaaaattacctagtcaggttgttaatatcattgaagattgcggttattctagtgtttgggatgaattaaaatttcaggctaaagagatgtatggtttaccagccttcccactcttatatgaagtttcaacaatttctaaaatcagagcaggtttttcgtatggacaagcaagtagtgtagaacaattgaaaaagaataatttaccagccctctttattcatggtgataaggataattttgttccaacaagtatggtttatgacaactataaagctacagcaggtaagaaagagctttatattgtaaaaggggcaaaacatgcgaaatcttttgaaacagagccagaaaaatatgagaaacgtatctctagttttttgaaaaaatatgaaaaa

SEQ ID NO: 1214 - DNA, 855 bp, Streptococcus agalactiae; identical to SEQ ID NO: 1208

SEQ ID NO: 1215 - protein, 308 aa, Streptococcus agalactiae
MKKIRLSKFIKMIVVILFLISVAASFYFFHVAQVRDDKSFISNGQRKPGNSLYAYDKSFDKLLKQKIEMTNQNIKQVAWYVPAVKKTHKTAVVVHGFANSKENMKAYGWLFHKLGYNVLMPDNIAHGESHGQLIGYGWNDRENIIKWTEMIVDKNPSSQITLFGVSMGGATVMMASGEKLPSQVVNIIEDCGYSSVWDELKFQAKEMYGLPAFPLLYEVSTISKIRAGFSYGQASSVEQLKKNNLPALFIHGDKDNFVPTSMVYDNYKATAGKKELYIVKGAKHAKSFETEPEKYEKRISSFLKKYEK

SEQ ID NO: 1216 - protein, 285 aa, Streptococcus agalactiae
ASFYFFHVAQVRDDKSFISNGQRKPGNSLYAYDKSFDKLLKQKIEMTNQNIKQVAWYVPAAKKTHKTAVVVHGFANSKENMKAYGWLFHKLGYNVLMPDNIAHGESHGQLIGYGWNDRENIIKWTEMIVDKNPSSQITLFGVSMGGATVMMASGEKLPSQVVNIIEDCGYSSVWDELKFQAKEMYGLPAFPLLYEVSTISKIRAGFSYGQASSVEQLKKNNLPALFIHGDKDNFVPTSMVYDNYKATAGKKELYIVKGAKHAKSFETEPEKYEKRISSFLKKYEK

SEQ ID NO: 1217 - protein, 270 aa, Streptococcus agalactiae
SFISNGQRKPGNSLYAYDKSFDKLLKQKIEMTNQNIKQVAWYVPAAKKTHKTAVVVHGFANSKENMKAYGWLFHKLGYNVLMPDNIAHGESHGQLIGYGWNDRENIIKWTEMIVDKNSSSQITLFGVSMGGATVMMASGEKLPSQVVNIIEDCGYSGVWDELKFQAKEMYGLPAFPLLYEVSTISKIRAGFSYGQASSVEQLKKNNLPALFIHGDKDNFVPTSMVYDNYKATAGKKELYIVKGAKHAKSFETEPEKYEKRISSFLKKYEK

SEQ ID NO: 1218 - protein, 284 aa, Streptococcus agalactiae
SFYFFHVAQVRDDKSFISNGQRKPGNSLYAYDKSFDKLLKQKIEMTNQNIKQVAWYVPAAKKTHKTAVVVHGFANSKENMKAYGWLFHKLGYNVLMPDNIAHGESHGQLIGYGWNDRENIIKWTEMIVDKNSSSQITLFGVSMGGATVMMASGEKLPSQVVNIIEDCGYSGVWDELKFQAKEMYGLPAFPLLYEVSTISKIRAGFSYGQASSVEQLKKNNLPALFIHGDKDNFVPTSMVYDNYKATAGKKELYIVKGAKHAKSFETEPEKYEKRISSFLKKYEK

SEQ ID NO: 1219 - protein, 285 aa, Streptococcus agalactiae
ASFYFFHVAQVRDDKSFISNGQRKPGNSLYAYDKSFDKLLKQKIEMTNQNIKQVAWYVPAVKKTHKTAVVVHGFANSKENMKAYGWLFHKLGYNVLMPDNIAHGESHGQLIGYGWNDRENIIKWTEMIVDKNPSSQITLFGVSMGGATVMMASGEKLPSQVVNIIEDCGYSSVWDELKFQAKEMYGLPAFPLLYEVSTISKIRAGFSYGQASSVEQLKKNNLPALFIHGDKDNFVPTSMVYDNYKATAGKKELYIVKGAKHAKSFETEPEKYEKRISSFLKKYEK

SEQ ID NO: 1220 - protein, 285 aa, Streptococcus agalactiae
ASFYFFHVAQVRDDKSFISNGQRKPGNSLYAYDKSFDKLLKQKIEMTNQNIKQVAWYVPAAKKTHKTVVVVHGFANSKENMKAYGWLFHKLGYNVLMPDNIAHGESHGQLIGYGWNDRENIIKWTEMIVDKNPSSQITLFGVSMGGATVMMASGEKLPSQVVNIIEDCGYSSVWDELKFQAKEMYGLPAFPLLYEVSTISKIRAGFSYGQASSVEQLKKNNLPALFIHGDKDNFVPTSMVYDNYKATAGKKELYIVKGAKHAKSFETEPEKYEKRISSFLKKYEK

SEQ ID NO: 1221 - protein, 285 aa, Streptococcus agalactiae; identical to SEQ ID NO: 1220

SEQ ID NO: 1222 - protein, 285 aa, Streptococcus agalactiae; identical to SEQ ID NO: 1220

SEQ ID NO: 1223 - protein, 285 aa, Streptococcus agalactiae; identical to SEQ ID NO: 1216

SEQ ID NO: 1224 - protein, 285 aa, Streptococcus agalactiae
ASFYFFHVAQVRDDKSFISNGQRKPGNSLYAYDKSFDKLLKQKIEMTNQNIKQVAWYVPAAKKTHKTAVVVHGFANSKENMKAYGWLFHKLGYNVLIPDNIAHGESHGQLIGYGWNDRENIIKWTEMIVDKNPSSQITLFGVSMGGATVMMASGEKLPSQVVNIIEDCGYSSVWDELKFQAKEMYGLPAFPLLYEVSTISKIRAGFSYGQASSVEQLKKNNLPALFIHGDKDNFVPTSMVYDNYKATAGKKELYIVKGAKHAKSFETEPEKYEKRISSFLKKYEK

SEQ ID NO: 1225 - protein, 285 aa, Streptococcus agalactiae; identical to SEQ ID NO: 1219

SEQ ID NO: 1226 - DNA, 690 bp, Streptococcus agalactiae
atgatgaaagttttagcctttgatacttcaagcaaagcactatcagtggctgtactaaacaatatggaatgtttagcgactgtcactatcaatatcaaaaagaatcatagcattaatttgatgccagccattgattttttaatgcaatcaattgatttagaacctcaagatttggaccgtatcgtagtagcagagggtccaggatcttatacgggcttacgtgtagctgttgctacagcaaaaatgctagcttatacgcttaagattgacttagttggagtatctagcctgtacgctttaacaaatggattttcagaaaatgatttattggtaccacttatagatgcacgacgtaataatgtttatgttggtttctatcaaaatggtgatactgttaaaccagactgtcacacttctcttgaagaagtcttacaagaggtggggaataaagccaatgttcattttgtcggagaggttgcagcattttttgatcagattaagaaagccttaccacatgctaaaattacagaaactttaccttgtgcagtagcaattgggcgcaaaggacaaaaaatgaaaagcgttaatgtagatgcgtttgttccacgatacttaaaacgtgttgaagctgaggaaaattggttaaaaaaccactgtgaaacgaatacagaagaatatattaagagagtt

SEQ ID NO: 1227 - DNA, 660 bp, Streptococcus agalactiae
aaagttttagcctttgatacttcaagcaaagcactatcagtggctgtactaaacaatatggaatgtttagcgactgtcactatcaatatcaaaaagaatcatagcattaatttgatgccagccattgattttttaatgcaatcaattgatttagaacctcaagatttggaccgtatcgtagtggcagagggtccaggatcttatacgggcttacgtgtagctgttgctacagcaaaaatgctagcttatacgcttaagattgacttagttggagtatctagcctgtacgctttaacaaatggattttcagaaaatgatttgttggtaccacttatagatgcacgacgtaacaatgtttatgttggtttctatcaaaatggtgatactgttaaaccagactgtcacacttctcttgaagaagtcttacaagaggtggggaataaagccaatgttcattttgtcggagaggttgcagcattttttgatcagattaagaaagccttaccacatgctaaaattacagaaactttaccttgtgcagtggcaattgggcgcaaaggacaaaaaatggaaagcgttaatgtagatgcgtttgttccacgatacttaaaacgagttgaagctgaggaaaattggttaaaaaaccactgtgaaacgaat

SEQ ID NO: 1228 - DNA, 660 bp, Streptococcus agalactiae
aaagttttagcctttgatacttcaagcaaagcactatcagtggctgtactaaacaatatggaatgtttagcgactgtcactatcaatatcaaaaagaatcatagcattaatttgatgccagccattgattttttaatgcaatcaattgatttagaacctcaagatttggaccgtatcgtagtagcagagggtccaggatcttatacgggcttacgtgtagctgttgctacagcaaaaatgctagcttatacgcttaagattgacttagttggagtatctagcctgtacgctttaacaaatggattttcagaaaatgatttattggtaccacttatagatgcacgacgtaacaatgtttatgttggtttctatcaaaatggagatactgttaaaccagactgtcacacttctcttgaagaagtcttacaagaggtggggaataaagccaatgttcattttgtcggagaggttgcagcatttgttgaccagattaagaaagttttaccacatgctaaaattacagaaactttaccttgtgcagtggcaattgggcgcaaaggacaaaaaatgaaaagcgttaatgtagatgcgtttgttccacgatacttaaaacgtgttgaagctgaggaaaattggttaagaaaccactgtgaaacgaat

SEQ ID NO: 1229 - DNA, 684 bp, Streptococcus agalactiae
aaagttttagcctttgatacttcaagcaaagcactatcagtggctgtactaaacaatatggaatgtttagcgactgtcactatcaatatcaaaaagaatcatagcattaatttgatgccagccattgattttttaatgcaatcaattgatttagaacctcaagatttggaccgtatcgtagtagcagagggtccaggatcttatacgggcttacgtgtagctgttgctacagcaaaaatgctagcttatacgcttaagattgacttagttggagtatctagcctgtacgctttaacaaatggattttcagaaaatgatttattggtaccacttatagatgcacgacgtaacaatgtttatgttggtttctatcaaaatggagatactgttaaaccagactgtcacacttctcttgaagaagtcttacaagaggtggggaataaagccaatgttcattttgtcggagaggttgcagcatttgttgaccagattaagaaagttttaccacatgctaaaattacagaaactttaccttgtgcagtggcaattgggcgcaaaggacaaaaaatgaaaagcgttaatgtagatgcgtttgttccacgatacttaaaacgtgttgaagctgaggaaaattggttaagaaaccactgtgaaacgaatacagaagaatatattaagagagtt

SEQ ID NO: 1230 - DNA, 684 bp, Streptococcus agalactiae
aaagttttagcctttgatacttcaagcaaagcactatcagtggctgtactaaacaatatggaatgtttagcgactgtcactatcaatatcaaaaagaatcatagcattaatttgatgccagccattgattttttaatgcaatcaattgatttagaacctcaagatttggaccgtatcgtagtagcagagggtccaggatcttatacgggcttacgtgtagctgttgctacagcaaaaatgctagcttatacgcttaagattgacttagttggagtatctagcctgtacgctttaacaaatggattttcagaaaatgatttattggtaccacttatagatgcacgacgtaataatgtttatgttggtttctatcaaaatggtgatactgttaaaccagactgtcacacttctcttgaagaagtcttacaagaggtggggaataaagccaatgttcattttgtcggagaggttgcagcattttttgatcagattaagaaagccttaccacatgctaaaattacagaaactttaccttgtgcagtagcaattgggcgcaaaggacaaaaaatgaaaagcgttaatgtagatgcgtttgttccacgatacttaaaacgtgttgaagctgaggaaaattggttaaaaaaccactgtgaaacgaatacagaagaatatattaagagagtt

SEQ ID NO: 1231 - DNA, 684 bp, Streptococcus agalactiae
  misc_feature 588, 589: n = A,T,C or G
aaagttttagcctttgatacttcaagcaaagcactatcagtggctgtactaaacaatatggaatgtttagcgactgtcactatcaatatcaaaaagaatcatagcattaatttgatgccagccattgattttttaatgcaatcaattgatttagaacctcaagatttggaccgtatcgtagtagcagagggtccaggatcttatacgggcttacgtgtagctgttgctacagcaaaaatgctagcttatacgcttaagattgacttagttggagtatctagcctgtacgctttaacaaatggattttcagaaaatgatttattggtaccacttatagatgcacgacgtaacaatgtttatgttggtttctatcaaaatggtgatactgttaaaccagactgtcacacttctcttgaagaagtcttacaagaggtggggaataaagccaatgttcattttgtcggagaggttgcagcattttttgatcagattaagaaagccttaccacatgctaaaattacagaaactttaccttgtgcagtagcaattgggcgcaaaggacaaaaaatgaaaagcgttaatgtaganncgtttgttccacgatacttaaaacgtgttgaagctgaggaaaattggttaaaaaaccactgtgaaacgaatacagaagaatatattaagagagtt

SEQ ID NO: 1232 - DNA, 684 bp, Streptococcus agalactiae
aaagttttagcctttgatacttcaagcaaagcactatcagtggctgtactaaacaatatggaatgtttagcgactgtcactatcaatatcaaaaagaatcatagcattaatttgatgccagccattgattttttaatgcaatcaattgatttagaacctcaagatttggaccgtatcgtagtagcagagggtccaggatcttatacgggcttacgtgtagctgttgctacagcaaaaatgctagcttatacgcttaagattgacttagttggagtatctagcctgtacgctttaacaaatggattttcagaaaatgatttattggtaccacttatagatgcacgacgtaacaatgtttatgttggtttctatcaaaatggtgatactgttaaaccagactgtcacacttctcttgaagaagtcttacaagaggtggggaataaagccaatgttcattttgtcggagaggttgcagcattttttgatcagattaagaaagccttaccacatgctaaaattacagaaactttaccttgtgcagtagcaattgggcgcaaaggacaaaaaatgaaaagcgttaatgtagatgcgtttgttccacgatacttaaaacgtgttgaagctgaggaaaattggttaaaaaaccactgtgaaacgaatacagaagaatatattaagagagtt

SEQ ID NO: 1233 - DNA, 684 bp, Streptococcus agalactiae
aaagttttagcctttgatacttcaagcaaagcactatcagtggctgtactaaacaatatggaatgtttagcgactgtcactatcaatatcaaaaagaatcatagcattaatttgatgccagccattgattttttaatgcaatcaattgatttagaacctcaagatttggaccgtatcgtagtatcagagggtccaggatcttatacgggcttacgtgtagctgttgctacagcaaaaatgctagcttatacgcttaagattgacttagttggagtatctagcctgtacgctttaacaaatggattttcagaaaatgatttattggtaccacttatagatgcacgacgtaacaatgtttatgttggtttctatcaaaatggtgatactgttaaaccagactgtcacacttctcttgaagaagtcttacaagaggtggggaataaagccaatgttcattttgtcggagaggttgcagcattttttgatcagattaagaaagccttaccacatgctaaaattacagaaactttaccttgtgcagtagcaattgggcgcaaaggacaaaaaatgaaaagcgttaatgtagatgcgtttgttccacgatacttaaaacgtgttgaagctgaggaaaattggttaaaaaaccactgtgaaacgaatacagaagaatatattaagagagtt

SEQ ID NO: 1234 - DNA, 684 bp, Streptococcus agalactiae
aaagttttagcctttgatacttcaagcaaagcactatcagtggctgtactaaacaatatggaatgtttagcgactgtcactatcaatatcaaaaagaatcatagcattaatttgatgccagccattgattttttaatgcaatcaattgatttagaacctcaagatttggaccgtatcgtagtggcagagggtccaggatcttatacgggcttacgtgtagctgttgctacagcaaaaatgctagcttatacgcttaagattgacttagttggagtatctagcctgtacgctttaacaaatggattttcagaaaatgatttgttggtaccacttatagatgcacgacgtaacaatgtttatgttggtttctatcaaaatggtgatactgttaaaccagactgtcacacttctcttgaagaagtcttacaagaggtggggaataaagccaatgttcattttgtcggagaggttgcagcattttttgatcagattaagaaagccttaccacatgctaaaattacagaaactttaccttgtgcagtggcaattgggcgcaaaggacaaaaaatggaaagcgttaatgtagatgcgtttgttccacgatacttaaaacgagttgaagctgaggaaaattggttaaaaaaccactgtgaaacgaatacagaagaatatattaagagagtt

SEQ ID NO: 1235 - DNA, 684 bp, Streptococcus agalactiae
aaagttttagcctttgatacttcaagcaaagcactatcagtggctgtactaaacaatatggaatgtttagcgactgtcactatcaatatcaaaaagaatcatagcattaatttgatgccagccattgattttttaatgcaatcaattgatttagaacctcaagatttggaccgtatcgtagtagcagagggtccaggatcttatacgggcttacgtgtagctgttgctacagcaaaaatgctagcttatacgcttaagattgacttagttggagtatctagcctgtacgctttaacaaatggattttcagaaaatgatttattggtaccacttatagatgcacgacgtaacaatgtttatgttggtttctatcaaaatggtgatactgttaaaccagactgtcacacttctcttgaagaagtcttacaagaggtggggaataaagccaatgttcattttgtcggagaggttgcagcatttgttgaccagattaagaaagctttaccacatgctaaaattacagaaactttaccttgtgcagtggcaattgggcgcaaaggacaaaaaatggaaagcgttaatgtagatgcgtttgttccacgatacttaaaacgtgttgaagctgaggaaaattggttaaaaaaccactgtgaaacgaatacagaagaatatattaagagagtt

SEQ ID NO: 1236 - DNA, 684 bp, Streptococcus agalactiae; identical to SEQ ID NO: 1229

SEQ ID NO: 1237 - protein, 230 aa, Streptococcus agalactiae
MMKVLAFDTSSKALSVAVLNNMECLATVTINIKKNHSINLMPAIDFLMQSIDLEPQDLDRIVVAEGPGSYTGLRVAVATAKMLAYTLKIDLVGVSSLYALTNGFSENDLLVPLIDARRNNVYVGFYQNGDTVKPDCHTSLEEVLQEVGNKANVHFVGEVAAFFDQIKKALPHAKITETLPCAVAIGRKGQKMKSVNVDAFVPRYLKRVEAEENWLKNHCETNTEEYIKRV

SEQ ID NO: 1238 - protein, 220 aa, Streptococcus agalactiae
KVLAFDTSSKALSVAVLNNMECLATVTINIKKNHSINLMPAIDFLMQSIDLEPQDLDRIVVAEGPGSYTGLRVAVATAKMLAYTLKIDLVGVSSLYALTNGFSENDLLVPLIDARRNNVYVGFYQNGDTVKPDCHTSLEEVLQEVGNKANVHFVGEVAAFFDQIKKALPHAKITETLPCAVAIGRKGQKMESVNVDAFVPRYLKRVEAEENWLKNHCETN

SEQ ID NO: 1239 - protein, 220 aa, Streptococcus agalactiae
KVLAFDTSSKALSVAVLNNMECLATVTINIKKNHSINLMPAIDFLMQSIDLEPQDLDRIVVAEGPGSYTGLRVAVATAKMLAYTLKIDLVGVSSLYALTNGFSENDLLVPLIDARRNNVYVGFYQNGDTVKPDCHTSLEEVLQEVGNKANVHFVGEVAAFVDQIKKVLPHAKITETLPCAVAIGRKGQKMKSVNVDAFVPRYLKRVEAEENWLRNHCETN

SEQ ID NO: 1240 - protein, 228 aa, Streptococcus agalactiae
KVLAFDTSSKALSVAVLNNMECLATVTINIKKNHSINLMPAIDFLMQSIDLEPQDLDRIVVAEGPGSYTGLRVAVATAKMLAYTLKIDLVGVSSLYALTNGFSENDLLVPLIDARRNNVYVGFYQNGDTVKPDCHTSLEEVLQEVGNKANVHFVGEVAAFVDQIKKVLPHAKITETLPCAVAIGRKGQKMKSVNVDAFVPRYLKRVEAEENWLRNHCETNTEEYIKRV

SEQ ID NO: 1241 - protein, 228 aa, Streptococcus agalactiae
KVLAFDTSSKALSVAVLNNMECLATVTINIKKNHSINLMPAIDFLMQSIDLEPQDLDRIVVAEGPGSYTGLRVAVATAKMLAYTLKIDLVGVSSLYALTNGFSENDLLVPLIDARRNNVYVGFYQNGDTVKPDCHTSLEEVLQEVGNKANVHFVGEVAAFFDQIKKALPHAKITETLPCAVAIGRKGQKMKSVNVDAFVPRYLKRVEAEENWLKNHCETNTEEYIKRV

SEQ ID NO: 1242 - protein, 228 aa, Streptococcus agalactiae
  VARIANT 196, 197: Xaa = Any Amino Acid
KVLAFDTSSKALSVAVLNNMECLATVTINIKKNHSINLMPAIDFLMQSIDLEPQDLDRIVVAEGPGSYTGLRVAVATAKMLAYTLKIDLVGVSSLYALTNGFSENDLLVPLIDARRNNVYVGFYQNGDTVKPDCHTSLEEVLQEVGNKANVHFVGEVAAFFDQIKKALPHAKITETLPCAVAIGRKGQKMKSVNVXXFVPRYLKRVEAEENWLKNHCETNTEEYIKRV

SEQ ID NO: 1243 - protein, 228 aa, Streptococcus agalactiae; identical to SEQ ID NO: 1241

SEQ ID NO: 1244 - protein, 228 aa, Streptococcus agalactiae
KVLAFDTSSKALSVAVLNNMECLATVTINIKKNHSINLMPAIDFLMQSIDLEPQDLDRIVVSEGPGSYTGLRVAVATAKMLAYTLKIDLVGVSSLYALTNGFSENDLLVPLIDARRNNVYVGFYQNGDTVKPDCHTSLEEVLQEVGNKANVHFVGEVAAFFDQIKKALPHAKITETLPCAVAIGRKGQKMKSVNVDAFVPRYLKRVEAEENWLKNHCETNTEEYIKRV

SEQ ID NO: 1245 - protein, 228 aa, Streptococcus agalactiae
KVLAFDTSSKALSVAVLNNMECLATVTINIKKNHSINLMPAIDFLMQSIDLEPQDLDRIVVAEGPGSYTGLRVAVATAKMLAYTLKIDLVGVSSLYALTNGFSENDLLVPLIDARRNNVYVGFYQNGDTVKPDCHTSLEEVLQEVGNKANVHFVGEVAAFFDQIKKALPHAKITETLPCAVAIGRKGQKMESVNVDAFVPRYLKRVEAEENWLKNHCETNTEEYIKRV

SEQ ID NO: 1246 - protein, 228 aa, Streptococcus agalactiae
KVLAFDTSSKALSVAVLNNMECLATVTINIKKNHSINLMPAIDFLMQSIDLEPQDLDRIVVAEGPGSYTGLRVAVATAKMLAYTLKIDLVGVSSLYALTNGFSENDLLVPLIDARRNNVYVGFYQNGDTVKPDCHTSLEEVLQEVGNKANVHFVGEVAAFVDQIKKALPHAKITETLPCAVAIGRKGQKMESVNVDAFVPRYLKRVEAEENWLKNHCETNTEEYIKRV

SEQ ID NO: 1247 - protein, 228 aa, Streptococcus agalactiae; identical to SEQ ID NO: 1240

SEQ ID NO: 1248 - DNA, 1242 bp, Streptococcus agalactiae
atgagtaaacgacaaaatttaggaattagtaaaaaaggagcaattatatcagggctctcagtggcactaattgtagtaataggtggctttttatgggtacaatctcaacctaataagagtgcagtaaaaactaactacaaagtttttaatgttagagaaggaagtgtttcgtcctcaactcttttgacaggaaaagctaaggctaatcaagaacagtatgtgtattttgatgctaataaaggtaatcgagcaactgtcacagttaaagtgggtgataaaatcacagctggtcagcagttagttcaatatgatacaacaactgcacaagcagcctacgacactgctaatcgtcaattaaataaagtagcgcgtcagattaataatctaaagacaacaggaagtcttccagctatggaatcaagtgatcaatcttcttcatcatcacaaggacaagggactcaatcgactagtggtgcgacgaatcgtctacagcaaaattatcaaagtcaagctaatgcttcatacaaccaacaacttcaagatttgaatgatgcttatgcagatgcacaggcagaagtaaataaagcacaaaaagcattgaatgatactgttattacaagtgacgtatcagggacagttgttgaagttaatagtgatattgatccagcttcaaaaactagtcaagtacttgtccatgtagcaactgaaggtaaactccaagtacaaggaacgatgagtgagtatgatttggctaatgttaaaaaagaccaggctgttaaaataaaatctaaggtctatcctgacaaggaatgggaaggtaaaatttcatatatctcaaattatccagaagcagaagcaaacaacaatgactctaataacggctctagtgctgtaaattataaatataaagtagatattactagccctctcgatgcattaaaacaaggttttaccgtatcagttgaagtagttaatggagataagcaccttattgtccctacaagttctgtgataaacaaagataataaacactttgtttgggtatacaatgattctaatcgtaaaatttccaaagttgaagtcaaaattggtaaagctgatgctaagacacaagaaattttatcaggtttgaaagcaggacaaatcgtggttactaatccaagtaaaaccttcaaggatgggcaaaaaattgataatattgaatcaatcgatcttaactctaataagaaatcagaggtgaaa

SEQ ID NO: 1249 - DNA, 1150 bp, Streptococcus agalactiae
tttttatgggtacaatctcaacctaataagagtgcagtaaaaactaactacaaagtttttaatgttagagaaggaagtgtttcgtcctcaactcttttgacaggaaaagctaaggctaatcaagaacagtatgtgtattttgatgctaataaaggtaatcgagcaactgtcacagttaaagtgggtgataaaatcacagctggtcagcagttagttcaatatgatacaacaactgcacaagcagcctacgacactgctaatcgtcaattaaataaagtagcgcgtcagattaataatctaaagacaacaggaagtcttccagctatggaattaagtgatcaatcttcttcatcatcacaaggacaagggactcaatcgactagtggtgcgacgaatcgtctacagcaaaattatcaaagtcaagctaatgcttcatacaaccaacaacttcaagatttgaatgatgcttatgcagatgcacaggcagaagtaaataaagcacaaaaagcattgaatgatactgttattacaagtgacgtatcagggacagttgttgaagttaatagtgatattgatccagcttcaaaaactagtcaagtacttgtccatgtagcaactgaaggtaaactccaagtacaaggaacgatgagtgagtatgatttggctaatgttaaaaaagaccaggctgttaaaataaaatctaaggtctatcctgacaaggaatgggaaggtaaaatttcatatatctcaaattatccagaagcagaagcaaacaacaatgactctaataacggctctagtgctgtaaattataaatataaagtagatattactagccctctcgatgcattaaaacaaggttttaccgtatcagttgaagtagttaatggagataagcaccttattgtccctacaagttctgtgataaacaaagataataaacactttgtttgggtatacaatgattctaatcgtaaaatttccaaagttgaagtcaaaattggtaaagctgatgctaagacacaagaaattttatcaggtttgaaagcaggacaaatcgtggttactaatccaagtaaaaccttcaaggatgggcaaaaaattgataatattgaatcaatcgatcttaactctaataagaaatcagagg

SEQ ID NO: 1250 - DNA, 1155 bp, Streptococcus agalactiae
tttttatgggtacaatctcaacctaataagagtgcagtaaaaactaactacaaagtttttaatgttagagaaggaagtgtttcgtcctcaactcttttgacaggaaaagctaaggctaatcaagaacagtatgtgtattttgatgctaataaaggtaatcgagcaactgttacagttaaagtgggtgataaaatcacagctggtcagcagttagttcaatatgatacaacaactgcacaagcagcctacgacactgctaatcgtcaattaaataaagtagcgcgtcagattaataatctaaagacaacaggaagtcttccagctatggaatcaagtgatcaatcttcatcatcatcacaaggacaaggggctcaatcgactagtggtgcgacgaatcgtctacagcaaaattatcaaagtcaagctaatgcttcatacaaccaacaacttcaagatttgaatgatgcttatgcagatgcacaggcagaagtaaataaagcacaaaaagcattgaatgatactgttattacaagtgacgtatcagggacagttgttgaagttaatagtgatattgatccagcttcaaaaactagtcaagtacttgtccatgtagcaactgagggtaaactccaagtacaaggaacgatgagtgagtatgatttggctaatgttaaaaaagaccagtctgttaaaataaaatctaaggtctatcctgacaaggaatgggaaggtaaaatttcatatatctcaaattatccagaagcagaagcaaacaacaatgactctaataacggctctagtgctgtaaattataaatataaagtagatattactagccctctcgatgcattaaaacaaggttttactgtatcagttgaagtagttaatggagataagcaccttattgttcctacaagttctgtgacaaacaaagataataaacactttgtttgggtatacaatgattctaatcgtaaaatttccaaagttgaagtcaaaattggtaaagctgatgctaagacacaagaaattttatcaggtttgaaagcaggacaaatcgtggttactaatccaagcaaaactttcaaggatgggcaaaaaattgataatattgaatcaatagatcttaagtctaataagaaatcagaggtgaaa

SEQ ID NO: 1251 - DNA, 1152 bp, Streptococcus agalactiae
tttttatgggtacaatctcaacctaataagagtgcagtaaaaactaattacaaagtttttaatgttagagaaggaagtgtttcgtcctcaactcttttgacaggaaaagctaaggctaatcaagaacagtatgtgtattttgatgctaataagggtaatcgagcaactgttacagttaaagtgggtgataaaatcacagctggtcagcagttagttcaatatgatacaacaactgcacaagcagcctacgacactgctaatcgtcaattaaataaagtagcgcgtcagattaataatctaaagacaacaggaagtcttccagctatggaatcaagtgatcaatcttcatcatcatcacaaggacaagggactcaatcgactagtggtgcgacgaatcgtctacagcaaaattatcaaagtcaagctaatgcttcatacaaccaacaacttcaagatttgaatgatgcttatgcagatgcacaggcagaagtaaataaagcacaaaaagcattgaatgatactgttattacaagtgacgtatcagggacagttgttgaagttaatagtgatattgatccagcttcaaaaactagtcaagtacttgtccatgtagcaactgaaggtaaactccaagtacaaggaacgatgagtgagtatgatttggctaatgtaaaaaaagaccaggctgttaaaataaaatctaaggtctatcctgacaaggaatgggaaggtaaaatttcatatatctcaaattatccagaagcagaagcaaacaacaatgactctaataacggctctagtgctgtaaattataaatataaagtagatattactagccctctcgatgcattaaaacaaggttttactgtatcagttgaagtagttaatggagataagcaccttattgttcctacaagttctgtgacaaacaaagataataaacactttgtttgggtatacaatgattctaatcgtaaaatttccaaagttgaagtcaaaattggtaaagctgatgctaagacacaagaaattttatcaggtttgaaagcaggacaaatcgtagttactaatccaagtaaagctttcaaggatgggcaaaaaattgataatattgaatcaatcgatcttaagtctaataagaaatcagaggtg

SEQ ID NO: 1252 - DNA, 1149 bp, Streptococcus agalactiae
tttttatgggtacaatctcaacctaataagagtgcagtaaaaactaactacaaagtttttaatgttagagaaggaagtgtttcgtcctcaactcttttgacaggaaaagctaaggctaatcaagaacagtatgtgtattttgatgctaataaaggtaatcgagcaactgtcacagttaaagtgggtgataaaatcacagctggtcagcagttagttcaatatgatacaacaactgcacaagcagcctacgacactgctaatcgtcaattaaataaagtagcgcgtcagattaataatctaaagacaacaggaagtcttccagctatggaatcaagtgatcaatcttcttcatcatcacaaggacaagggactcaatcgactagtggtgcgacgaatcgtctacagcaaaattatcaaagtcaagctaatgcttcatacaaccaacaacttcaagatttgaatgatgcttatgcagatgcacaggcagaagtaaataaagcacaaaaagcattgaatgatactgttattacaagtgacgtatcagggacagttgttgaagttaatagtgatattgatccagcttcaaaaactagtcaagtacttgtccatgtagcaactgaaggtaaactccaagtacaaggaacgatgagtgagtatgatttggctaatgttaaaaaagaccaggctgttaaaataaaatctaaggtctatcctgacaaggaatgggaaggtaaaatttcatatatctcaaattatccagaagcagaagcaaacaacaatgactctaataacggctctagtgctgtaaattataaatataaagtagatattactagccctctcgatgcattaaaacaaggttttaccgtatcagttgaagtagttaatggagataagcaccttattgtccctacaagttctgtgataaacaaagataataaacactttgtttgggtatacaatgattctaatcgtaaaatttccaaagttgaagtcaaaattggtaaagctgatgctaagacacaagaaattttatcaggtttgaaagcaggacaaatcgtggttactaatccaagtaaaaccttcaaggatgggcaaaaaattgataatattgaatcaatcgatcttaactctaataagaaatcagag

SEQ ID NO: 1253 - DNA, 1154 bp, Streptococcus agalactiae
tttttatgggtacaatctcaacctaataagagtgcagtaaaaactaattacaaagtttttaatgttagagaaggaagtgtttcgtcctcaactcttttgacaggaaaagctaaggctaatcaagaacagtatgtgtattttgatgctaataaaggtaatcgagcaactgttacagttaaagtgggtgataaaatcacagctggtcagcagttagttcaatatgatacaacaactgcacaagcagcctacgacactgctaatcgtcaattaaataaagtagcgcgtcagattaataatctaaagacaacagggagttttccagctatggaatcaagtgatcaatcttcatcatcatcacaaggacaagggactcaatcgactagtggtgcgacgaatcgtctacagcaaaattatcaaagtcaagctaatgcttcatacaaccaacaacttcaagatttgaatgatgcttatgcagatgcacaggcagaagtaaataaagcacaaaaagcattgaatgatactgttattacaagtgacgtatcagggacagttgttgaagttaatagtgatattgatccagcttcaaaaactagtcaagtacttgtccatgtagcaactgaaggtaaactccaagtacaaggaacgatgagtgagtatgatttggctaatgttaaaaaagatcaggctgttaaaataaaatctaaggtctatcctgacaaggaatgggaaggtaaaatttcatatatctcaaattatccagaagcagaagcaaacaacaatgactctaataacggctctagtgctgtaaattataaatataaagtagatattactagccctctcgatgcattaaaacaaggttttaccgtatcagttgaagtagttaatggagataagcaccttattgtccctacaagttctgtgataaacaaagataataaacactttgtttgggtatacaatgattctaatcgtaaaatttccaaagttgaagtcaaaattggtaaagctgatgctaagacacaagaaattttatcaggtttgaaagcaggacaaatcgtggttactaatccaagcaaaactttcaaggatgggcaaaaaattgataatattgaatcaatcgatcttaagtctaataagaaatcagaggtgaa

SEQ ID NO: 1254 - DNA, 1154 bp, Streptococcus agalactiae; identical to SEQ ID NO: 1253

SEQ ID NO: 1255 - DNA, 1154 bp, Streptococcus agalactiae; identical to SEQ ID NO: 1253

SEQ ID NO: 1256 - DNA, 1153 bp, Streptococcus agalactiae
tttttatgggtacaatctcaacctaataagagtgcagtaaaaactaactacaaagtttttaatgttagagaaggaagtgtttcgtcctcaactcttttgacaggaaaagctaaggctaatcaagaacagtatgtgtattttgatgctaataaaggtaatcgagcaactgtcacagttaaagtgggtgataaaatcacagctggtcagcagttagttcaatatgatacaacaactgcacaagcagcctacgacactgctaatcgtcaattaaataaagtagcgcgtcagattaataatctaaagacaacaggaagtcttccagctatggaattaagtgatcaatcttcttcatcatcacaaggacaagggactcaatcgactagtggtgcgacgaatcgtctacagcaaaattatcaaagtcaagctaatgcttcatacaaccaacaacttcaagatttgaatgatgcttatgcagatgcacaggcagaagtaaataaagcacaaaaagcattgaatgatactgttattacaagtgacgtatcagggacagttgttgaagttaatagtgatattgatccagcttcaaaaactagtcaagtacttgtccatgtagcaactgaaggtaaactccaagtacaaggaacgatgagtgagtatgatttggctaatgttaaaaaagaccaggctgttaaaataaaatctaaggtctatcctgacaaggaatgggaaggtaaaatttcatatatctcaaattatccagaagcagaagcaaacaacaatgactctaataacggctctagtgctgtaaattataaatataaagtagatattactagccctctcgatgcattaaaacaaggttttaccgtatcagttgaagtagttaatggagataagcaccttattgtccctacaagttctgtgataaacaaagataataaacactttgtttgggtatacaatgattctaatcgtaaaatttccaaagttgaagtcaaaattggtaaagctgatgctaagacacaagaaattttatcaggtttgaaagcaggacaaatcgtggttactaatccaagtaaaaccttcaaggatgggcaaaaaattgataatattgaatcaatcgatcttaactctaataagaaatcagaggtga

SEQ ID NO: 1257 - DNA, 1154 bp, Streptococcus agalactiae
tttttatgggtacaatctcaacctaataagagtgcagtaaaaactaactacaaagtttttaatgttagagaaggaagtgtttcgtcctcaactcttttgacaggaaaagctaaggctaatcaagaacagtatgtgtattttgatgctaataaaggtaatcgagcaactgtcacagttaaagtgggtgataaaatcacagctggtcagcagttagttcaatatgatacaacaactgcacaagcagcctacgacactgctaatcgtcaattaaataaagtagcgcgtcagattaataatctaaagacaacaggaagtcttccagctatggaatcaagtgatcaatcttcttcatcatcacaaggacaagggactcaatcgactagtggtgcgacgaatcgtctacagcaaaattatcaaagtcaagctaatgcttcatacaaccaacaacttcaagatttgaatgatgcttatgcagatgcacaggcagaagtaaataaagcacaaaaagcattgaatgatactgttattacaagtgacgtatcagggacagttgttgaagttaatagtgatattgatccagcttcaaaaactagtcaagtacttgtccatgtagcaactgaaggtaaactccaagtacaaggaacgatgagtgagtatgatttggctaatgttaaaaaagaccaggctgttaaaataaaatctaaggtctatcctgacaaggaatgggaaggtaaaatttcatatatctcaaattatccagaagcagaagcaaacaacaatgactctaataacggctctagtgctgtaaattataaatataaagtagatattactagccctctcgatgcattaaaacaaggttttaccgtatcagttgaagtagttaatggagataagcaccttattgtccctacaagttctgtgataaacaaagataataaacactttgtttgggtatacaatgattctaatcgtaaaatttccaaagttgaagtcaaaattggtaaagctgatgctaagacacaagaaattttatcaggtttgaaagcaggacaaatcgtggttactaatccaagtaaaaccttcaaggatgggcaaaaaattgataatattgaatcaatcgatcttaactctaataagaaatcagaggtgaa

SEQ ID NO: 1258 - DNA, 1155 bp, Streptococcus agalactiae; identical to SEQ ID NO: 1250

SEQ ID NO: 1259 - protein, 414 aa, Streptococcus agalactiae
MSKRQNLGISKKGAIISGLSVALIVVIGGFLWVQSQPNKSAVKTNYKVFNVREGSVSSSTLLTGKAKANQEQYVYFDANKGNRATVTVKVGDKITAGQQLVQYDTTTAQAAYDTANRQLNKVARQINNLKTTGSLPAMESSDQSSSSSQGQGTQSTSGATNRLQQNYQSQANASYNQQLQDLNDAYADAQAEVNKAQKALNDTVITSDVSGTVVEVNSDIDPASKTSQVLVHVATEGKLQVQGTMSEYDLANVKKDQAVKIKSKVYPDKEWEGKISYISNYPEAEANNNDSNNGSSAVNYKYKVDITSPLDALKQGFTVSVEVVNGDKHLIVPTSSVINKDNKHFVWVYNDSNRKISKVEVKIGKADAKTQEILSGLKAGQIVVTNPSKTFKDGQKIDNIESIDLNSNKKSEVK

SEQ ID NO: 1260 - protein, 383 aa, Streptococcus agalactiae
FLWVQSQPNKSAVKTNYKVFNVREGSVSSSTLLTGKAKANQEQYVYFDANKGNRATVTVKVGDKITAGQQLVQYDTTTAQAAYDTANRQLNKVARQINNLKTTGSLPAMELSDQSSSSSQGQGTQSTSGATNRLQQNYQSQANASYNQQLQDLNDAYADAQAEVNKAQKALNDTVITSDVSGTVVEVNSDIDPASKTSQVLVHVATEGKLQVQGTMSEYDLANVKKDQAVKIKSKVYPDKEWEGKISYISNYPEAEANNNDSNNGSSAVNYKYKVDITSPLDALKQGFTVSVEVVNGDKHLIVPTSSVINKDNKHFVWVYNDSNRKISKVEVKIGKADAKTQEILSGLKAGQIVVTNPSKTFKDGQKIDNIESIDLNSNKKSE

SEQ ID NO: 1261 - protein, 385 aa, Streptococcus agalactiae
FLWVQSQPNKSAVKTNYKVFNVREGSVSSSTLLTGKAKANQEQYVYFDANKGNRATVTVKVGDKITAGQQLVQYDTTTAQAAYDTANRQLNKVARQINNLKTTGSLPAMESSDQSSSSSQGQGAQSTSGATNRLQQNYQSQANASYNQQLQDLNDAYADAQAEVNKAQKALNDTVITSDVSGTVVEVNSDIDPASKTSQVLVHVATEGKLQVQGTMSEYDLANVKKDQSVKIKSKVYPDKEWEGKISYISNYPEAEANNNDSNNGSSAVNYKYKVDITSPLDALKQGFTVSVEVVNGDKHLIVPTSSVTNKDNKHFVWVYNDSNRKISKVEVKIGKADAKTQEILSGLKAGQIVVTNPSKTFKDGQKIDNIESIDLKSNKKSEVK

SEQ ID NO: 1262 - protein, 384 aa, Streptococcus agalactiae
FLWVQSQPNKSAVKTNYKVFNVREGSVSSSTLLTGKAKANQEQYVYFDANKGNRATVTVKVGDKITAGQQLVQYDTTTAQAAYDTANRQLNKVARQINNLKTTGSLPAMESSDQSSSSSQGQGTQSTSGATNRLQQNYQSQANASYNQQLQDLNDAYADAQAEVNKAQKALNDTVITSDVSGTVVEVNSDIDPASKTSQVLVHVATEGKLQVQGTMSEYDLANVKKDQAVKIKSKVYPDKEWEGKISYISNYPEAEANNNDSNNGSSAVNYKYKVDITSPLDALKQGFTVSVEVVNGDKHLIVPTSSVTNKDNKHFVWVYNDSNRKISKVEVKIGKADAKTQEILSGLKAGQIVVTNPSKAFKDGQKIDNIESIDLKSNKKSEV

SEQ ID NO: 1263 - protein, 383 aa, Streptococcus agalactiae
FLWVQSQPNKSAVKTNYKVFNVREGSVSSSTLLTGKAKANQEQYVYFDANKGNRATVTVKVGDKITAGQQLVQYDTTTAQAAYDTANRQLNKVARQINNLKTTGSLPAMESSDQSSSSSQGQGTQSTSGATNRLQQNYQSQANASYNQQLQDLNDAYADAQAEVNKAQKALNDTVITSDVSGTVVEVNSDIDPASKTSQVLVHVATEGKLQVQGTMSEYDLANVKKDQAVKIKSKVYPDKEWEGKISYISNYPEAEANNNDSNNGSSAVNYKYKVDITSPLDALKQGFTVSVEVVNGDKHLIVPTSSVINKDNKHFVWVYNDSNRKISKVEVKIGKADAKTQEILSGLKAGQIVVTNPSKTFKDGQKIDNIESIDLNSNKKSE

SEQ ID NO: 1264 - protein, 384 aa, Streptococcus agalactiae
FLWVQSQPNKSAVKTNYKVFNVREGSVSSSTLLTGKAKANQEQYVYFDANKGNRATVTVKVGDKITAGQQLVQYDTTTAQAAYDTANRQLNKVARQINNLKTTGSFPAMESSDQSSSSSQGQGTQSTSGATNRLQQNYQSQANASYNQQLQDLNDAYADAQAEVNKAQKALNDTVITSDVSGTVVEVNSDIDPASKTSQVLVHVATEGKLQVQGTMSEYDLANVKKDQAVKIKSKVYPDKEWEGKISYISNYPEAEANNNDSNNGSSAVNYKYKVDITSPLDALKQGFTVSVEVVNGDKHLIVPTSSVINKDNKHFVWVYNDSNRKISKVEVKIGKADAKTQEILSGLKAGQIVVTNPSKTFKDGQKIDNIESIDLKSNKKSEV

SEQ ID NO: 1265 - protein, 384 aa, Streptococcus agalactiae; identical to SEQ ID NO: 1264

SEQ ID NO: 1266 - protein, 384 aa, Streptococcus agalactiae; identical to SEQ ID NO: 1264

SEQ ID NO: 1267 - protein, 384 aa, Streptococcus agalactiae; identical to SEQ ID NO: 1264

SEQ ID NO: 1268 - protein, 384 aa, Streptococcus agalactiae
FLWVQSQPNKSAVKTNYKVFNVREGSVSSSTLLTGKAKANQEQYVYFDANKGNRATVTVKVGDKITAGQQLVQYDTTTAQAAYDTANRQLNKVARQINNLKTTGSLPAMELSDQSSSSSQGQGTQSTSGATNRLQQNYQSQANASYNQQLQDLNDAYADAQAEVNKAQKALNDTVITSDVSGTVVEVNSDIDPASKTSQVLVHVATEGKLQVQGTMSEYDLANVKKDQAVKIKSKVYPDKEWEGKISYISNYPEAEANNNDSNNGSSAVNYKYKVDITSPLDALKQGFTVSVEVVNGDKHLIVPTSSVINKDNKHFVWVYNDSNRKISKVEVKIGKADAKTQEILSGLKAGQIVVTNPSKTFKDGQKIDNIESIDLNSNKKSEV

SEQ ID NO: 1269 - protein, 384 aa, Streptococcus agalactiae
FLWVQSQPNKSAVKTNYKVFNVREGSVSSSTLLTGKAKANQEQYVYFDANKGNRATVTVKVGDKITAGQQLVQYDTTTAQAAYDTANRQLNKVARQINNLKTTGSLPAMESSDQSSSSSQGQGTQSTSGATNRLQQNYQSQANASYNQQLQDLNDAYADAQAEVNKAQKALNDTVITSDVSGTVVEVNSDIDPASKTSQVLVHVATEGKLQVQGTMSEYDLANVKKDQAVKIKSKVYPDKEWEGKISYISNYPEAEANNNDSNNGSSAVNYKYKVDITSPLDALKQGFTVSVEVVNGDKHLIVPTSSVINKDNKHFVWVYNDSNRKISKVEVKIGKADAKTQEILSGLKAGQIVVTNPSKTFKDGQKIDNIESIDLNSNKKSEV

SEQ ID NO: 1270 - protein, 385 aa, Streptococcus agalactiae; identical to SEQ ID NO: 1261

SEQ ID NO: 1271 - DNA, 930 bp, Streptococcus agalactiae
atgaaaaaaattggaattattgtcctcacactactgaccttctttttggtatcttgcggacaacaaactaaacaagaaagcactaaaacaactatttctaaaatgcctaaaattgaaggcttcacctattatggaaaaattcctgaaaatccgaaaaaagtaattaattttacatattcttacactgggtatttattaaaactaggtgttaatgtttcaagttacagtttagacttagaaaaagatagccccgtttttggtaaacaactgaaagaagctaaaaaattaactgctgatgatacagaagctattgccgcacaaaaacctgatttaatcatggttttcgatcaagatccaaacatcaatactctgaaaaaaattgcaccaactttagttattaaatatggtgcacaaaattatttagatatgatgccagccttggggaaagtattcggtaaagaaaaagaagctaatcagtgggttagccaatggaaaactaaaactctcgctgtcaaaaaagatttacaccatatcttaaagcctaacactacttttactattatggatttttatgataaaaatatctatttatatggtaataattttggacgcggtggagaactaatctatgattcactaggttatgctgccccagaaaaagtcaaaaaagatgtctttaaaaaagggtggtttaccgtttcgcaagaagcaatcggtgattacgttggagattatgcccttgttaatataaacaaaacgactaaaaaagcagcttcatcacttaaagaaagtgatgtctggaagaatttaccagctgtcaaaaaagggcacatcatagaaagtaactacgacgtgttttatttctctgaccctctatctttagaagctcaattaaaatcatttacaaaggctatcaaagaaaatacaaat

SEQ ID NO: 1272 - DNA, 794 bp, Streptococcus agalactiae
gaaggcttcacctattatggaaaaattcctgaaaatccgaaaaaagtaattaattttacatattcttacactgggtatttattaaaactaggtgttaatgtttcaagttacagtttagacttagaaaaagatagccccgtttttggtaagcaactgaaagaagctaaaaaattaactgctgatgatacagaagctattgccgcacaaaaacctgatttaatcatggttttcgatcaagatccaaacatcaatactctgaaaaaaattgcaccaactttagttattaaatatggtgcacaaaattatttagatatgatgccagccttggggaaagtattcggtaaagaaaaagaagctaatcagtgggttagccaatggaaaactaaaactctcgctgccaaaaaagatttacaccatatcttaaagcctaacactacttttactattatggatttttatgataaaaatatctatttatatggtaataattttggacgcggtggagaactaatctatgattcactaggttatgctgccccagaaaaagtcaaaaaagatgtctttaaaaaagggtggtttaccgtttcgcaagaagcaatcggtgattacgttggagattatgcccttgttaatataaacaaaacgactaaaaaagcagcttcatcacttaaagaaagtgatgtctggaagaatttaccagctgtcaaaaaagggcacatcatagaaagtaactacgacgtgttttatttctctgaccctctatctttagaagctcaattaaaatcatttacaaa

SEQ ID NO: 1273 - DNA, 794 bp, Streptococcus agalactiae
gaaggcttcacctattatggaaaaattcctgaaaatccgaaaaaagtaattaattttacatattcttacactggatatttattaaaactaggagttaatgtttcaagttacagtttagacttagaaaaagatagccccgtttttggtaaacaactgaaaggagctaaaaaattaactgctgatgatacagaagctattgccgcacaaaaacctgatttaatcatggtttttgatcaagatccaaacatcaatactctgaaaaaaattgcaccaactttagttattaaatatggtgcacaaaattatttagatatgatgccagctttggggaaagtattcggtaaagaaaaagaagctaatcagtgggttagccaatggaaaactaaaactctcgctgccaaaaaagatttacaccatatcttaaaacctaacactacttttaccattatggatttttatgataaaaatatctatttatatggtaataattttggacgcggtggagaactaatctatgattcactaggttatgctgccccagaaaaagtcaaaaaagatgtctttaaaaaagggtggtttaccgtttcgcaagaagcaatcggtgattacgttggagattatgcccttgttaatataaacaaaacgactaaaaaagcagcttcatcacttaaagaaagtgatgtctggaagaatttaccagctgtcaaaaaagggcacatcatagaaagtaactacgacgtgttttatttctctgaccctctatctttagaagctcaattaaaatcatttacaaa

SEQ ID NO: 1274 - DNA, 794 bp, Streptococcus agalactiae
gaaggcttcacctattatggaaaaattcctgaaaatccgaaaaaagtaattaattttacatattcttacactggatatttattaaaactaggagttaatgtttcaagttacagtttagacttagaaaaagatagccccgtttttggtaagcaactgaaaggagctaaaaaattaactgctgatgatacagaagctattgccgcacaaaaacctgatttaatcatggtttttgatcaagatccaaacatcaatactctgaaaaaaattgcaccaactttagttattaaatatggtgcacaaaattatttagatatgatgccagctttggggaaagtattcggtaaagaaaaagaagctaatcagtgggttagccaatggaaaactaaaactctcgctgccaaaaaagatttacaccatatcttaaggcctaacactacttttactattatagatttttatgataaaaatatctatttatatggtaataattttggacgcggtggagaactaatctatgattcactaggttatgctgccccagaaaaagtcaaaaaagatgtctttaaaaaagggtggtttaccgtttcgcaagaagcaatcggtgattacgttggagattatgcccttgttaatataaacaaaacgactaaaaaagcagcttcatcacttaaagaaagtgatgtttggaagaatttaccagctgtcaaaaaagggcacatcatagaaagtaactacgacgtgttttatttctctgaccctctatctttagaagctcaattaaaatcatttacaaa

SEQ ID NO: 1275 - DNA, 794 bp, Streptococcus agalactiae
gaaggcttcacctattatggaaaaattcctgaaaatccgaaaaaagtaattaattttacatattcttacactgggtatttattaaaactaggtgttaatgtttcaagttacagtttagacttagaaaaagatagccccgtttttggtaaacaactgaaagaagctaaaaaattaactgctgatgatacagaagctattgccgcacaaaaacctgatttaatcatggttttcgatcaagatccaaacatcaatactctgaaaaaaattgcaccaactttagttattaaatatggtgcacaaaattatttagatatgatgccagccttggggaaagtattcggtaaagaaaaagaagctaatcagtgggttagccaatggaaaactaaaactctcgctgtcaaaaaagatttacaccatatcttaaagcctaacactacttttactattatggatttttatgataaaaatatctatttatatggtaataattttggacgcggtggagaactaatctatgattcactaggttatgctgccccagaaaaagtcaaaaaagatgtctttaaaaaagggtggtttaccgtttcgcaagaagcaatcggtgattacgttggagattatgcccttgttaatataaacaaaacgactaaaaaagcagcttcatcacttaaagaaagtgatgtctggaagaatttaccagctgtcaaaaaagggcacatcatagaaagtaactacgacgtgttttatttctctgaccctctatctttagaagctcaattaaaatcatttacaaa

SEQ ID NO: 1276 - DNA, 794 bp, Streptococcus agalactiae; identical to SEQ ID NO: 1272

SEQ ID NO: 1277 - DNA, 794 bp, Streptococcus agalactiae; identical to SEQ ID NO: 1272

SEQ ID NO: 1278 - DNA, 794 bp, Streptococcus agalactiae; identical to SEQ ID NO: 1272

SEQ ID NO: 1279 - DNA, 794 bp, Streptococcus agalactiae; identical to SEQ ID NO: 1272

SEQ ID NO: 1280 - DNA, 794 bp, Streptococcus agalactiae; identical to SEQ ID NO: 1272

SEQ ID NO: 1281 - DNA, 794 bp, Streptococcus agalactiae
gaaggcttcacctattatggaaaaattcctgaaaatccgaaaaaagtaattaattttacatattcttacactggatatttattaaaactaggagttaatgtttcaagttacagtttagacttagaaaaagatagccccgtttttggtaagcaactgaaaggagctaaaaaattaactgctgatgatacagaagctattgccgcacaaaaacctgatttaatcatggtttttgatcaagatccaaacatcaatactctgaaaaaaattgcaccaactttagttattaaatatggtgcacaaaattatttagatatgatgccagctttggggaaagtattcggtaaagaaaaagaagctaatcagtgggttagccaatggaaaactaaaactctcgctgccaaaaaagatttacaccatatcttaaaacctaacactacttttaccattatggatttttatgataaaaatatctatttatatggtaataattttggacgcggtggagaactaatctatgattcactaggttatgctgccccagaaaaagtcaaaaaagatgtctttaaaaaagggtggtttaccgtttcgcaagaagcaatcggtgattacgttggagattatgcccttgttaatataaacaaaacgactaaaaaagcagcttcatcacttaaagaaagtgatgtctggaagaatttaccagctgtcaaaaaagggcacatcatagaaagtaactacgacgtgttttatttctctgaccctctatctttagaagctcaattaaaatcatttacaaa

SEQ ID NO: 1282 - protein, 310 aa, Streptococcus agalactiae
MKKIGIIVLTLLTFFLVSCGQQTKQESTKTTISKMPKIEGFTYYGKIPENPKKVINFTYSYTGYLLKLGVNVSSYSLDLEKDSPVFGKQLKEAKKLTADDTEAIAAQKPDLIMVFDQDPNINTLKKIAPTLVIKYGAQNYLDMMPALGKVFGKEKEANQWVSQWKTKTLAVKKDLHHILKPNTTFTIMDFYDKNIYLYGNNFGRGGELIYDSLGYAAPEKVKKDVFKKGWFTVSQEAIGDYVGDYALVNINKTTKKAASSLKESDVWKNLPAVKKGHIIESNYDVFYFSDPLSLEAQLKSFTKAIKENTN

SEQ ID NO: 1283 - protein, 264 aa, Streptococcus agalactiae
EGFTYYGKIPENPKKVINFTYSYTGYLLKLGVNVSSYSLDLEKDSPVFGKQLKEAKKLTADDTEAIAAQKPDLIMVFDQDPNINTLKKIAPTLVIKYGAQNYLDMMPALGKVFGKEKEANQWVSQWKTKTLAAKKDLHHILKPNTTFTIMDFYDKNIYLYGNNFGRGGELIYDSLGYAAPEKVKKDVFKKGWFTVSQEAIGDYVGDYALVNINKTTKKAASSLKESDVWKNLPAVKKGHIIESNYDVFYFSDPLSLEAQLKSFT

SEQ ID NO: 1284 - protein, 264 aa, Streptococcus agalactiae
EGFTYYGKIPENPKKVINFTYSYTGYLLKLGVNVSSYSLDLEKDSPVFGKQLKGAKKLTADDTEAIAAQKPDLIMVFDQDPNINTLKKIAPTLVIKYGAQNYLDMMPALGKVFGKEKEANQWVSQWKTKTLAAKKDLHHILKPNTTFTIMDFYDKNIYLYGNNFGRGGELIYDSLGYAAPEKVKKDVFKKGWFTVSQEAIGDYVGDYALVNINKTTKKAASSLKESDVWKNLPAVKKGHIIESNYDVFYFSDPLSLEAQLKSFT

SEQ ID NO: 1285 - protein, 264 aa, Streptococcus agalactiae
EGFTYYGKIPENPKKVINFTYSYTGYLLKLGVNVSSYSLDLEKDSPVFGKQLKGAKKLTADDTEAIAAQKPDLIMVFDQDPNINTLKKIAPTLVIKYGAQNYLDMMPALGKVFGKEKEANQWVSQWKTKTLAAKKDLHHILRPNTTFTIIDFYDKNIYLYGNNFGRGGELIYDSLGYAAPEKVKKDVFKKGWFTVSQEAIGDYVGDYALVNINKTTKKAASSLKESDVWKNLPAVKKGHIIESNYDVFYFSDPLSLEAQLKSFT

SEQ ID NO: 1286 - protein, 264 aa, Streptococcus agalactiae
EGFTYYGKIPENPKKVINFTYSYTGYLLKLGVNVSSYSLDLEKDSPVFGKQLKEAKKLTADDTEAIAAQKPDLIMVFDQDPNINTLKKIAPTLVIKYGAQNYLDMMPALGKVFGKEKEANQWVSQWKTKTLAVKKDLHHILKPNTTFTIMDFYDKNIYLYGNNFGRGGELIYDSLGYAAPEKVKKDVFKKGWFTVSQEAIGDYVGDYALVNINKTTKKAASSLKESDVWKNLPAVKKGHIIESNYDVFYFSDPLSLEAQLKSFT

SEQ ID NO: 1287 - protein, 264 aa, Streptococcus agalactiae; identical to SEQ ID NO: 1283

SEQ ID NO: 1288 - protein, 264 aa, Streptococcus agalactiae; identical to SEQ ID NO: 1283

SEQ ID NO: 1289 - protein, 264 aa, Streptococcus agalactiae; identical to SEQ ID NO: 1283

SEQ ID NO: 1290 - protein, 264 aa, Streptococcus agalactiae; identical to SEQ ID NO: 1283

SEQ ID NO: 1291 - protein, 264 aa, Streptococcus agalactiae; identical to SEQ ID NO: 1283

SEQ ID NO: 1292 - protein, 264 aa, Streptococcus agalactiae; identical to SEQ ID NO: 1284

SEQ ID NO: 1293 - DNA, 1662 bp, Streptococcus agalactiae
atgaaattatcgaagaagttattgttttcggctgctgttttaacaatggtggcggggtcaactgttgaaccagtagctcagtttgcgactggaatgagtattgtaagagctgcagaagtgtcacaagaacgcccagcgaaaacaacagtaaatatctataaattacaagctgatagttataaatcggaaattacttctaatggtggtatcgagaataaagacggcgaagtaatatctaactatgctaaacttggtgacaatgtaaaaggtttgcaaggtgtacagtttaaacgttataaagtcaagacggatatttctgttgatgaattgaaaaaattgacaacagttgaagcagcagatgcaaaagttggaacgattcttgaagaaggtgtcagtctacctcaaaaaactaatgctcaaggtttggtcgtcgatgctctggattcaaaaagtaatgtgagatacttgtatgtagaagatttaaagaattcaccttcaaacattaccaaagcttatgctgtaccgtttgtgttggaattaccagttgctaactctacaggtacaggtttcctttctgaaattaatatttaccctaaaaacgttgtaactgatgaaccaaaaacagataaagatgttaaaaaattaggtcaggacgatgcaggttatacgattggtgaagaattcaaatggttcttgaaatctacaatccctgccaatttaggtgactatgaaaaatttgaaattactgataaatttgcagatggcttgacttataaatctgttggaaaaatcaagattggttcgaaaacactgaatagagatgagcactacactattgatgaaccaacagttgataaccaaaatacattaaaaattacgtttaaaccagagaaatttaaagaaattgctgagctacttaaaggaatgacccttgttaaaaatcaagatgctcttgataaagctactgcaaatacagatgatgcggcatttttggaaattccagttgcatcaactattaatgaaaaagcagttttaggaaaagcaattgaaaatacttttgaacttcaatatgaccatactcctgataaagctgacaatccaaaaccatctaatcctccaagaaaaccagaagttcatactggtgggaaacgatttgtaaagaaagactcaacagaaacacaaacactaggtggtgctgagtttgatttgttggcttctgatgggacagcagtaaaatggacagatgctcttattaaagcgaatactaataaaaactatattgctggagaagctgttactgggcaaccaatcaaattgaaatcacatacagacggtacgtttgagattaaaggtttggcttatgcagttgatgcgaatgcagagggtacagcagtaacttacaaattaaaagaaacaaaagcaccagaaggttatgtaatccctgataaagaaatcgagtttacagtatcacaaacatcttataatacaaaaccaactgacatcacggttgatagtgctgatgcaacacctgatacaattaaaaacaacaaacgtccttcaatccctaatactggtggtattggtacggctatctttgtcgctatcggtgctgcggtgatggcttttgctgttaaggggatgaagcgtcgtacaaaagataac

SEQ ID NO: 1294 - DNA, 1449 bp, Streptococcus agalactiae
gcagaagtgtcacaagaacgcccagcgaaaacagcagtaaatatctataaattacaagctgatagttataaatcggaaattacttctaatggtggtatcgagaataaagacggcgaagtaatatctaactatgctaaacttggtgacaatgtaaaaggtttgcaaggtgtacagtttaaacgttataaagtcaagacggatatttctgttgatgaattgaaaaaattgacaacagttgaagcagcagatgcaaaagttggaacgattcttgaagaaggtgtcagtctacctcaaaaaactaatgctcaaggtttggtcgtcgatgctctggattcaaaaagtaatgtgagatacttgtatgtagaagatttaaagaattcaccttcaaacattaccaaagcttatgctgtaccgtttgtgttggaattaccagttgctaactctacaggtacaggtttcctttctgaaattaatatttaccctaaaaacgttgtaactgatgaaccaaaaacagataaagatgttaaaaaattaggtcaggacgatgcaggttatacgattggtgaagaattcaaatggttcttgaaatctacaatccctgccaatttaggtgactatgaaaaatttgaaattactgataaatttgcagatggcttgacttataaatctgttggaaaaatcaagattggttcgaaaacactgaatagagatgagcactacactattgatgaaccaacagttgataaccaaaatacattaaaaattacgtttaaaccagagaaatttaaagaaattgctgagctacttaaaggaatgacccttgttaaaaatcaagatgctcttgataaagctactgcaaatacagatgatgcggcatttttggaaattccagttgcatcaactattaatgaaaaagcagttttaggaaaagcaattgaaaatacttttgaacttcaatatgaccatactcctgataaagctgacaatccaaaaccatctaatcctccaagaaaaccagaagttcatactggtgggaaacgatttgtaaagaaagactcaacagaaacacaaacactaggtggtgctgagtttgatttgttggcttctgatgggacagcagtaaaatggacagatgctcttattaaagcgaatactaataaaaactatattgctggagaagctgttactgggcaaccaatcaaattgaaatcacatacagacggtacgtttgagattaaaggtttggcttatgcagttgatgcgaatgcagagggtacagcagtaacttacaaattaaaagaaacaaaagcaccagaaggttatgtaatccctgataaagaaatcgagtttacagtatcacaaacatcttataatacaaaaccaactgacatcacggttgatagtgctgatgcaacacctgatacaattaaaaacaacaaacgtccttca

SEQ ID NO: 1295 - DNA, 1439 bp, Streptococcus agalactiae
gcagaagtgtcacaagaacgcccagcgaaaacaacagtaaatatctataaattacaagctgatagttataaatcggaaattacttctaatggtggtatcgagaataaagacggcgaagtaatatctaactatgctaaacttggtgacaatgtaaaaggtttgcaaggtgtacagtttaaacgttataaagtcaagacggatatttctgttgatgaattgaaaaaattgacaacagttgaagcagcagatgcaaaagttggaacgattcttgaagaaggtgtcagtctacctcaaaaaactaatgctcaaggtttggtcgtcgatgctctggattcaaaaagtaatgtgagatacttgtatgtagaagatttaaagaattcaccttcaaacattaccaaagcttatgctgtaccgtttgtgttggaattaccagttgctaactctacaggtacaggtttcctttctgaaattaatatttaccctaaaaacgttgtaactgatgaaccaaaaacagataaagatgttaaaaaattaggtcaggacgatgcaggttatacgattggtgaagaattcaaatggttcttgaaatctacaatccctgccaatttaggtgactatgaaaaatttgaaattactgataaatttgcagatggcttgacttataaatctgttggaaaaatcaagattggttcgaaaacactgaatagagatgagcactacactattgatgaaccaacagttgataaccaaaatacattaaaaattacgtttaaaccagagaaatttaaagaaattgctgagctacttaaaggaatgacccttgttaaaaatcaagatgctcttgataaagctactgcaaatacagatgatgcggcatttttggaaattccagttgcatcaactattaatgaaaaagcagttttaggaaaagcaattgaaaatacttttgaacttcaatatgaccatactcctgataaagctgacaatccaaaaccatctaatcctccaagaaaaccagaagttcatactggtgggaaacgatttgtaaagaaagactcaacagaaacacaaacactaggtggtgctgagtttgatttgttggcttctgatgggacagcagtaaaatggacagatgctcttattaaagcgaatactaataaaaactatattgctggagaagctgttactgggcaaccaatcaaattgaaatcacatacagacggtacgtttgagattaaaggtttggcttatgcagttgatgcgaatgcagagggtacagcagtaacttacaaattaaaagaaacaaaagcaccagaaggttatgtaatccctgataaagaaatcgagtttacagtatcacaaacatcttataatacaaaaccaactgacatcacggttgatagtgctgatgcaacacctgatacaattaaaaacaacaa

SEQ ID NO: 1296 - DNA, 1449 bp, Streptococcus agalactiae
gcagaagtgtcacaagaacgcccagcgaaaacagcagtaaatatctataaattacaagctgatagttataaatcggaaattacttctaatggtggtatcgagaataaagacggcgaagtaatatctaactatgctaaacttggtgacaatgtaaaaggtttgcaaggtgtacagtttaaacgttataaagtcaagacggatatttctgttgatgaattgaaaaaattgacaacagttgaagcagcagatgcaaaagttggaacgattcttgaagaaggtgtcagtctacctcaaaaaactaatgctcaaggtttggtcgtcgatgctctggattcaaaaagtaatgtgagatacttgtatgtagaagatttaaagaattcaccttcaaacattaccaaagcttatgctgtaccgtttgtgttggaattaccagttgctaactctacaggtacaggtttcctttctgaaattaatatttaccctaaaaacgttgtaactgatgaaccaaaaacagataaagatgttaaataattaggtcaggacgatgcaggttatacgattggtgaagaattcaaatggttcttgaaatctacaatccctgccaatttaggtgactatgaaaaatttgaaattactgataaatttgcagatggcttgacttataaatctgttggaaaaatcaagattggttcgaaaacactgaatagagatgagcactacactattgatgaaccaacagttgataaccaaaatacattaaaaattacgtttaaaccagagaaatttaaagaaattgctgagctacttaaaggaatgacccttgttaaaaatcaagatgctcttgataaagctactgcaaatacagatgatgcggcatttttggaaattccagttgcatcaactattaatgaaaaagcagttttaggaaaagcaattgaaaatacttttgaacttcaatatgaccatactcctgataaagctgacaatccaaaaccatctaatcctccaagaaaaccagaagttcatactggtgggaaacgatttgtaaagaaagactcaacagaaacacaaacactaggtggtgctgagtttgatttgttggcttctgatgggacagcagtaaaatggacagatgctcttattaaagcgaatactaataaaaactatattgctggagaagctgttactgggcaaccaatcaaattgaaatcacatacagacggtacgtttgagattaaaggtttggcttatgcagttgatgcgaatgcagagggtacagcagtaacttacaaattaaaagaaacaaaagcaccagaaggttatgtaatccctgataaagaaatcgagtttacagtatcacaaacatcttataatacaaaaccaactgacatcacggttgatagtgctgatgcaacacctgatacaattaaaaacaacaaacgtccttca

SEQ ID NO: 1297 - DNA, 1449 bp, Streptococcus agalactiae
gcagaagtgtcacaagaacgcccagcgaaaacaacagtaaatatctataaattacaagctgatagttataaatcggaaattacttctaatggtggtatcgagaataaagacggcgaagtaatatctaactatgctaaacttggtgacaatgtaaaaggtttgcaaggtgtacagtttaaacgttataaagtcaagacggatatttctgttgatgaattgaaaaaattgacaacagttgaagcagcagatgcaaaagttggaacgattcttgaagaaggtgtcagtctacctcaaaaaactaatgctcaaggtttggtcgtcgatgctctggattcaaaaagtaatgtgagatacttgtatgtagaagatttaaagaattcaccttcaaacattaccaaagcttatgctgtaccgtttgtgttggaattaccagttgctaactctacaggtacaggtttcctttctgaaattaatatttaccctaaaaacgttgtaactgatgaaccaaaaacagataaagatgttaaaaaattaggtcaggacgatgcaggttatacgattggtgaagaattcaaatggttcttgaaatctacaatccctgccaatttaggtgactatgaaaaatttgaaattactgataaatttgcagatggcttgacttataaatctgttggaaaaatcaagattggttcgaaaacactgaatagagatgagcactacactattgatgaaccaacagttgataaccaaaatacattaaaaattacgtttaaaccagagaaatttaaagaaattgctgagctacttaaaggaatgacccttgttaaaaatcaagatgctcttgataaagctactgcaaatacagatgatgcggcatttttggaaattccagttgcatcaactattaatgaaaaagcagttttaggaaaagcaattgaaaatacttttgaacttcaatatgaccatactcctgataaagctgacaatccaaaaccatctaatcctccaagaaaaccagaagttcatactggtgggaaacgatttgtaaagaaagactcaacagaaacacaaacactaggtggtgctgagtttgatttgttggcttctgatgggacagcagtaaaatggacagatgctcttattaaagcgaatactaataaaaactatattgctggagaagctgttactgggcaaccaatcaaattgaaatcacatacagacggtacgtttgagattaaaggtttggcttatgcagttgatgcgaatgcagagggtacagcagtaacttacaaattaaaagaaacaaaagcaccagaaggttatgtaatccctgataaagaaatcgagtttacagtatcacaaacatcttataatacaaaaccaactgacatcacggttgatagtgctgatgcaacacctgatacaattaaaaacaacaaacgtccttca

SEQ ID NO: 1298 - DNA, 1449 bp, Streptococcus agalactiae
  misc_feature 86: n = A,T,C or G
gcagaagtgtcacaagaacgcccagcgaaaacagcagtaaatatctataaattacaagctgatagttataaatcggaaattacttntaatggtggtatcgagaataaagacggcgaagtaatatctaactatgctaaacttggtgacaatgtaaaaggtttgcaaggtgtacagtttaaacgttataaagtcaagacggatatttctgttgatgaattgaaaaaattgacaacagttgaagcagcagatgcaaaagttggaacgattcttgaagaaggtgtcagtctacctcaaaaaactaatgctcaaggtttggtcgtcgatgctctggattcaaaaagtaatgtgagatacttgtatgtagaagatttaaagaattcaccttcaaacattaccaaagcttatgctgtaccgtttgtgttggaattaccagttgctaactctacaggtacaggtttcctttctgaaattaatatttaccctaaaaacgttgtaactgatgaaccaaaaacagataaagatgttaaaaaattaggtcaggacgatgcaggttatacgattggtgaagaattcaaatggttcttgaaatctacaatccctgccaatttaggtgactatgaaaaatttgaaattactgataaatttgcagatggcttgacttataaatctgttggaaaaatcaagattggttcgaaaacactgaatagagatgagcactacactattgatgaaccaacagttgataaccaaaatacattaaaaattacgtttaaaccagagaaatttaaagaaattgctgagctacttaaaggaatgacccttgttaaaaatcaagatgctcttgataaagctactgcaaatacagatgatgcggcatttttggaaattccagttgcatcaactattaatgaaaaagcagttttaggaaaagcaattgaaaatacttttgaacttcaatatgaccatactcctgataaagctgacaatccaaaaccatctaatcctccaagaaaaccagaagttcatactggtgggaaacgatttgtaaagaaagactcaacagaaacacaaacactaggtggtgctgagtttgatttgttggcttctgatgggacagcagtaaaatggacagatgctcttattaaagcgaatactaataaaaactatattgctggagaagctgttactgggcaaccaatcaaattgaaatcacatacagacggtacgtttgagattaaaggtttggcttatgcagttgatgcgaatgcagagggtacagcagtaacttacaaattaaaagaaacaaaagcaccagaaggttatgtaatccctgataaagaaatcgagtttacagtatcacaaacatcttataatacaaaaccaactgacatcacggttgatagtgctgatgcaacacctgatacaattaaaaacaacaaacgtccttca

SEQ ID NO: 1299 - DNA, 1443 bp, Streptococcus agalactiae
gcagaagtgtcacaagaacgcccagcgaaaacagcagtaaatatctataaattacaagctgatagttataaatcggaaattacttctaatggtggtatcgagaataaagacggcgaagtaatatctaactatgctaaacttggtgacaatgtaaaaggtttgcaaggtgtacagtttaaacgttataaagtcaagacggatatttctgttgatgaattgaaaaaattgacaacagttgaagcagcagatgcaaaagttggaacgattcttgaagaaggtgtcagtctacctcaaaaaactaatgctcaaggtttggtcgtcgatgctctggattcaaaaagtaatgtgagatacttgtatgtagaagatttaaagaattcaccttcaaacattaccaaagcttatgctgtaccgtttgtgttggaattaccagttgctaactctacaggtacaggtttcctttctgaaattaatatttaccctaaaaacgttgtaactgatgaaccaaaaacagataaagatgttaaaaaattaggtcaggacgatgcaggttatacgattggtgaagaattcaaatggttcttgaaatctacaatccctgccaatttaggtgactatgaaaaatttgaaattactgataaatttgcagatggcttgacttataaatctgttggaaaaatcaagattggttcgaaaacactgaatagagatgagcactacactattgatgaaccaacagttgataaccaaaatacattaaaaattacgtttaaaccagagaaatttaaagaaattgctgagctacttaaaggaatgacccttgttaaaaatcaagatgctcttgataaagctactgcaaatacagatgatgcggcatttttggaaattccagttgcatcaactattaatgaaaaagcagttttaggaaaagcaattgaaaatacttttgaacttcaatatgaccatactcctgataaagctgacaatccaaaaccatctaatcctccaagaaaaccagaagttcatactggtgggaaacgatttgtaaagaaagactcaacagaaacacaaacactaggtggtgctgagtttgatttgttggcttctgatgggacagcagtaaaatggacagatgctcttattaaagcgaatactaataaaaactatattgctggagaagctgttactgggcaaccaatcaaattgaaatcacatacagacggtacgtttgagattaaaggtttggcttatgcagttgatgcgaatgcagagggtacagcagtaacttacaaattaaaagaaacaaaagcaccagaaggttatgtaatccctgataaagaaatcgagtttacagtatcacaaacatcttataatacaaaaccaactgacatcacggttgatagtgctgatgcaacacctgatacaattaaaaacaacaaacgt

SEQ ID NO: 1300 - DNA, 1449 bp, Streptococcus agalactiae
gcagaagtgtcacaagaacgcccagcgaaaacagcagtaaatatctataaattacaagctgatagttataaattggaaattacttctaatggtggtatcgagaataaagacggcgaagtaatatctaactatgctaaacttggtgacaatgtaaaaggtttgcaaggtgtacagtttaaacgttataaagtcaagacggatatttctgttgatgaattgaaaaaattgacaacagttgaagcagcagatgcaaaagttggaacgattcttgaagaaggtgtcagtctacctcaaaaaactaatgctcaaggtttggtcgtcgatgctctggattcaaaaagtaatgtgagatacttgtatgtagaagatttaaagaattcaccttcaaacattaccaaagcttatgctgtaccgtttgtgttggaattaccagttgctaactctacaggtacaggtttcctttctgaaattaatatttaccctaaaaacgttgtaactgatgaaccaaaaacagataaagatgttaaaaaattaggtcaggacgatgcaggttatacgattggtgaagaattcaaatggttcttgaaatctacaatccctgccaatttaggtgactatgaaaaatttgaaattactgataaatttgcagatggcttgacttataaatctgttggaaaaatcaagattggttcgaaaacactgaatagagatgagcactacactattgatgaaccaacagttgataaccaaaatacattaaaaattacgtttaaaccagagaaatttaaagaaattgctgagctacttaaaggaatgacccttgttaaaaatcaagatgctcttgataaagctactgcaaatacagatgatgcggcatttttggaaattccagttgcatcaactattaatgaaaaagcagttttaggaaaagcaattgaaaatacttttgaacttcaatatgaccatactcctgataaagctgacaatccaaaaccatctaatcctccaagaaaaccagaagttcatactggtgggaaacgatttgtaaagaaagactcaacagaaacacaaacactaggtggtgctgagtttgatttgttggcttctgatgggacagcagtaaaatggacagatgctcttattaaagcgaatactaataaaaactatattgctggagaagctgttactgggcaaccaatcaaattgaaatcacatacagacggtacgtttgagattaaaggtttggcttatgcagttgatgcgaatgcagagggtacagcagtaacttacaaattaaaagaaacaaaagcaccagaaggttatgtaatccctgataaagaaatcgagtttacagtatcacaaacatcttataatccaaaaccaactgacatcacggttgatagtgctgatgcaacacctgatacaattaaaaacaacaaacgtccttca

SEQ ID NO: 1301 - DNA, 1449 bp, Streptococcus agalactiae; identical to SEQ ID NO: 1294

SEQ ID NO: 1302 - protein, 554 aa, Streptococcus agalactiae
MKLSKKLLFSAAVLTMVAGSTVEPVAQFATGMSIVRAAEVSQERPAKTTVNIYKLQADSYKSEITSNGGIENKDGEVISNYAKLGDNVKGLQGVQFKRYKVKTDISVDELKKLTTVEAADAKVGTILEEGVSLPQKTNAQGLVVDALDSKSNVRYLYVEDLKNSPSNITKAYAVPFVLELPVANSTGTGFLSEINIYPKNVVTDEPKTDKDVKKLGQDDAGYTIGEEFKWFLKSTIPANLGDYEKFEITDKFADGLTYKSVGKIKIGSKTLNRDEHYTIDEPTVDNQNTLKITFKPEKFKEIAELLKGMTLVKNQDALDKATANTDDAAFLEIPVASTINEKAVLGKAIENTFELQYDHTPDKADNPKPSNPPRKPEVHTGGKRFVKKDSTETQTLGGAEFDLLASDGTAVKWTDALIKANTNKNYIAGEAVTGQPIKLKSHTDGTFEIKGLAYAVDANAEGTAVTYKLKETKAPEGYVIPDKEIEFTVSQTSYNTKPTDITVDSADATPDTIKNNKRPSIPNTGGIGTAIFVAIGAAVMAFAVKGMKRRTKDN

SEQ ID NO: 1303 - protein, 483 aa, Streptococcus agalactiae
AEVSQERPAKTAVNIYKLQADSYKSEITSNGGIENKDGEVISNYAKLGDNVKGLQGVQFKRYKVKTDISVDELKKLTTVEAADAKVGTILEEGVSLPQKTNAQGLVVDALDSKSNVRYLYVEDLKNSPSNITKAYAVPFVLELPVANSTGTGFLSEINIYPKNVVTDEPKTDKDVKKLGQDDAGYTIGEEFKWFLKSTIPANLGDYEKFEITDKFADGLTYKSVGKIKIGSKTLNRDEHYTIDEPTVDNQNTLKITFKPEKFKEIAELLKGMTLVKNQDALDKATANTDDAAFLEIPVASTINEKAVLGKAIENTFELQYDHTPDKADNPKPSNPPRKPEVHTGGKRFVKKDSTETQTLGGAEFDLLASDGTAVKWTDALIKANTNKNYIAGEAVTGQPIKLKSHTDGTFEIKGLAYAVDANAEGTAVTYKLKETKAPEGYVIPDKEIEFTVSQTSYNTKPTDITVDSADATPDTIKNNKRPS

SEQ ID NO: 1304 - protein, 483 aa, Streptococcus agalactiae
  VARIANT 177: Xaa = Any Amino Acid
AEVSQERPAKTAVNIYKLQADSYKSEITSNGGIENKDGEVISNYAKLGDNVKGLQGVQFKRYKVKTDISVDELKKLTTVEAADAKVGTILEEGVSLPQKTNAQGLVVDALDSKSNVRYLYVEDLKNSPSNITKAYAVPFVLELPVANSTGTGFLSEINIYPKNVVTDEPKTDKDVKXLGQDDAGYTIGEEFKWFLKSTIPANLGDYEKFEITDKFADGLTYKSVGKIKIGSKTLNRDEHYTIDEPTVDNQNTLKITFKPEKFKEIAELLKGMTLVKNQDALDKATANTDDAAFLEIPVASTINEKAVLGKAIENTFELQYDHTPDKADNPKPSNPPRKPEVHTGGKRFVKKDSTETQTLGGAEFDLLASDGTAVKWTDALIKANTNKNYIAGEAVTGQPIKLKSHTDGTFEIKGLAYAVDANAEGTAVTYKLKETKAPEGYVIPDKEIEFTVSQTSYNTKPTDITVDSADATPDTIKNNKRPS

SEQ ID NO: 1305 - protein, 483 aa, Streptococcus agalactiae
AEVSQERPAKTTVNIYKLQADSYKSEITSNGGIENKDGEVISNYAKLGDNVKGLQGVQFKRYKVKTDISVDELKKLTTVEAADAKVGTILEEGVSLPQKTNAQGLVVDALDSKSNVRYLYVEDLKNSPSNITKAYAVPFVLELPVANSTGTGFLSEINIYPKNVVTDEPKTDKDVKKLGQDDAGYTIGEEFKWFLKSTIPANLGDYEKFEITDKFADGLTYKSVGKIKIGSKTLNRDEHYTIDEPTVDNQNTLKITFKPEKFKEIAELLKGMTLVKNQDALDKATANTDDAAFLEIPVASTINEKAVLGKAIENTFELQYDHTPDKADNPKPSNPPRKPEVHTGGKRFVKKDSTETQTLGGAEFDLLASDGTAVKWTDALIKANTNKNYIAGEAVTGQPIKLKSHTDGTFEIKGLAYAVDANAEGTAVTYKLKETKAPEGYVIPDKEIEFTVSQTSYNTKPTDITVDSADATPDTIKNNKRPS

SEQ ID NO: 1306 - protein, 481 aa, Streptococcus agalactiae
AEVSQERPAKTAVNIYKLQADSYKSEITSNGGIENKDGEVISNYAKLGDNVKGLQGVQFKRYKVKTDISVDELKKLTTVEAADAKVGTILEEGVSLPQKTNAQGLVVDALDSKSNVRYLYVEDLKNSPSNITKAYAVPFVLELPVANSTGTGFLSEINIYPKNVVTDEPKTDKDVKKLGQDDAGYTIGEEFKWFLKSTIPANLGDYEKFEITDKFADGLTYKSVGKIKIGSKTLNRDEHYTIDEPTVDNQNTLKITFKPEKFKEIAELLKGMTLVKNQDALDKATANTDDAAFLEIPVASTINEKAVLGKAIENTFELQYDHTPDKADNPKPSNPPRKPEVHTGGKRFVKKDSTETQTLGGAEFDLLASDGTAVKWTDALIKANTNKNYIAGEAVTGQPIKLKSHTDGTFEIKGLAYAVDANAEGTAVTYKLKETKAPEGYVIPDKEIEFTVSQTSYNTKPTDITVDSADATPDTIKNNKR

SEQ ID NO: 1307 - protein, 483 aa, Streptococcus agalactiae
  VARIANT 29: Xaa = Any Amino Acid
AEVSQERPAKTAVNIYKLQADSYKSEITXNGGIENKDGEVISNYAKLGDNVKGLQGVQFKRYKVKTDISVDELKKLTTVEAADAKVGTILEEGVSLPQKTNAQGLVVDALDSKSNVRYLYVEDLKNSPSNITKAYAVPFVLELPVANSTGTGFLSEINIYPKNVVTDEPKTDKDVKKLGQDDAGYTIGEEFKWFLKSTIPANLGDYEKFEITDKFADGLTYKSVGKIKIGSKTLNRDEHYTIDEPTVDNQNTLKITFKPEKFKEIAELLKGMTLVKNQDALDKATANTDDAAFLEIPVASTINEKAVLGKAIENTFELQYDHTPDKADNPKPSNPPRKPEVHTGGKRFVKKDSTETQTLGGAEFDLLASDGTAVKWTDALIKANTNKNYIAGEAVTGQPIKLKSHTDGTFEIKGLAYAVDANAEGTAVTYKLKETKAPEGYVIPDKEIEFTVSQTSYNTKPTDITVDSADATPDTIKNNKRPS

SEQ ID NO: 1308 - protein, 483 aa, Streptococcus agalactiae
AEVSQERPAKTAVNIYKLQADSYKLEITSNGGIENKDGEVISNYAKLGDNVKGLQGVQFKRYKVKTDISVDELKKLTTVEAADAKVGTILEEGVSLPQKTNAQGLVVDALDSKSNVRYLYVEDLKNSPSNITKAYAVPFVLELPVANSTGTGFLSEINIYPKNVVTDEPKTDKDVKKLGQDDAGYTIGEEFKWFLKSTIPANLGDYEKFEITDKFADGLTYKSVGKIKIGSKTLNRDEHYTIDEPTVDNQNTLKITFKPEKFKEIAELLKGMTLVKNQDALDKATANTDDAAFLEIPVASTINEKAVLGKAIENTFELQYDHTPDKADNPKPSNPPRKPEVHTGGKRFVKKDSTETQTLGGAEFDLLASDGTAVKWTDALIKANTNKNYIAGEAVTGQPIKLKSHTDGTFEIKGLAYAVDANAEGTAVTYKLKETKAPEGYVIPDKEIEFTVSQTSYNPKPTDITVDSADATPDTIKNNKRPS

SEQ ID NO: 1309 - protein, 483 aa, Streptococcus agalactiae; identical to SEQ ID NO: 1303

SEQ ID NO: 1310 - protein, 479 aa, Streptococcus agalactiae
AEVSQERPAKTTVNIYKLQADSYKSEITSNGGIENKDGEVISNYAKLGDNVKGLQGVQFKRYKVKTDISVDELKKLTTVEAADAKVGTILEEGVSLPQKTNAQGLVVDALDSKSNVRYLYVEDLKNSPSNITKAYAVPFVLELPVANSTGTGFLSEINIYPKNVVTDEPKTDKDVKKLGQDDAGYTIGEEFKWFLKSTIPANLGDYEKFEITDKFADGLTYKSVGKIKIGSKTLNRDEHYTIDEPTVDNQNTLKITFKPEKFKEIAELLKGMTLVKNQDALDKATANTDDAAFLEIPVASTINEKAVLGKAIENTFELQYDHTPDKADNPKPSNPPRKPEVHTGGKRFVKKDSTETQTLGGAEFDLLASDGTAVKWTDALIKANTNKNYIAGEAVTGQPIKLKSHTDGTFEIKGLAYAVDANAEGTAVTYKLKETKAPEGYVIPDKEIEFTVSQTSYNTKPTDITVDSADATPDTIKNN

SEQ ID NO: 1311 - DNA, 1134 bp, Streptococcus agalactiae
atgcctaagaagaaatcagataccccagaaaaagaagaagttgtcttaacggaatggcaaaagcgtaaccttgaatttttaaaaaaacgcaaagaagatgaagaagaacaaaaacgtattaacgaaaaattacgcttagataaaagaagtaaattaaatatttcttctcctgaagaacctcaaaatactactaaaattaagaagcttcattttccaaagatttcaagacctaagattgaaaagaaacagaaaaaagaaaaaatagtcaacagcttagccaaaactaatcgcattagaactgcacctatatttgtagtagcattcctagtcattttagtttccgttttcctactaactccttttagtaagcaaaaaacaataacagttagtggaaatcagcatacacctgatgatattttgatagagaaaacgaatattcaaaaaaacgattatttcttttctttaatttttaaacataaagctattgaacaacgtttagctgcagaagatgtatgggtaaaaacagctcagatgacttatcaatttcccaataagtttcatattcaagttcaagaaaataagattattgcatatgcacatacaaagcaaggatatcaacctgtcttggaaactggaaaaaaggctgatcctgtaaatagttcagagctaccaaagcacttcttaacaattaaccttgataaggaagatagtattaagctattaattaaagatttaaaggctttagaccctgatttaataagtgagattcaggtgataagtttagctgattctaaaacgacacctgacctcctgctgttagatatgcacgatggaaatagtattagaataccattatctaaatttaaagaaagacttcctttttacaaacaaattaagaagaaccttaaggaaccttctattgttgatatggaagtgggagtttacacaacaacaaataccattgaatcaacccctgttaaagcagaagatacaaaaaataaatcaactgataaaacacaaacacaaaatggtcaggttgcggaaaatagtcaaggacaaacaaataactcaaatactaatcaacaaggacaacagatagcaacagagcaggcacctaaccctcaaaatgttaat

SEQ ID NO: 1312 - DNA, 1131 bp, Streptococcus agalactiae
cctaagaagaaatcagataccccagaaaaagaagaagttgtcttaacggaatggcaaaagcgtaaccttgaatttttaaaaaaacgcaaagaagatgaagaagaacaaaaacgtattaacgaaaaattacgcttagataaaagaagtaaattaaatatttcttctcctgaagaacctcaaaatactactaaaattaagaagcttcattttccaaagatttcaagacctaagattgaaaagaaacagaaaaaagaaaaaatagtcaacagcttagccaaaactaatcgcattagaactgcacctatatttgtagtagcattcctagtcattttagtttccgttttcctactaactccttttagtaagcaaaaaacaataacagttagtggaaatcagcatacacctgatgatattttgatagagaaaacgaatattcaaaaaaacgattatttcttttctttaatttttaaacataaagctattgaacaacgtttagctgcagaagatgtatgggtaaaaacagctcagatgacttatcaatttcccaataagtttcatattcaagttcaagaaaataagattattgcatatgcacatacaaagcaaggatatcaacctgtcttggaaactggaaaaaaggctgatcctgtaaatagttcagagctaccaaagcacttcttaacaattaaccttgataaggaagatagtattaagctattaattaaagatttaaaggctttagaccctgatttaataagtgagattcaggtgataagtttagctgattctaaaacgacacctgacctcctgctgttagatatgcacgatggaaatagtattagaataccattatctaaatttaaagaaagacttcctttttacaaacaaattaagaagaaccttaaggaaccttctattgttgatatggaagtgggagtttacacaacaacaaataccattgaatcaacccctgttaaagcagaagatacaaaaaataaatcaactgataaaacacaaacacaaaatggtcaggttgcggaaaatagtcaaggacaaacaaataactcaaatactaatcaacaaggacaacagatagcaacagagcaggcacctaaccctcaaaatgttaat

SEQ ID NO: 1313 - DNA, 1131 bp, Streptococcus agalactiae; identical to SEQ ID NO: 1312

SEQ ID NO: 1314 - DNA, 1131 bp, Streptococcus agalactiae
cctaagaagaaatcagataccccagaaaaagaagaagttgtcttaacggaatggcaaaagcgtaaccttgaatttttaaaaaaacgcaaagaagatgaagaagaacaaaaacgtattaacgaaaaattacgcttagataaaagaagtaaattaaatatttcttctcctgaagaacctcaaaatactactaaaattaagaagcttcattttccaaagatttcaaaacctaagattgaaaagaaacagaaaaaagaaaaaatagtcaacagcttagccaaaactaatcgcattagaactgcacctatatttgtagtagcattcctagtcattttagtttccgttttcctactaactccttttagtaagcaaaaaacaataacagttagtggaaatcagcatacacctgatgatattttgatagaaaaaacgaatattcaaaaaaacgattatttcttttctttaatttttaaacataaagctattgaacaacgtttagctgcagaagatgtatgggtaaaaacagctcagatgacttatcaatttcccaataagtttcatattcaagttcaagaaaataagattattgcatatgcacatacaaagcaaggatatcagcctgtcttggaaactggaaaaaaggctgatcctgtaaatagttcagagctaccaaagcacttcttaacaattaaccttgataaggaagatagtattaagctattaattaaagatttaaaggctttagaccctgatttaataagtgagattcaggtgataagtttagctgattctaaaacgacacctgacctcctgctgttagatatgcatgatggaaatagtattagaataccattatctaaatttaaagaaagacttcctttttacaaacaaattaagaagaaccttaaggaaccttctattgttgatatggaagtgggagtttacacaacaacaagtactattgaatcaacccctgtgaaagcggaagatacaaaaaataaatcaactgataaaacacaaacacaaaatggtcaggttgcggaaaatagtcaaggacaaacaaataactcaaatactaatcaacaaggacaacagatagcaacagagcaggcacccaaccctcaaaatgttaat

SEQ ID NO: 1315 - DNA, 1131 bp, Streptococcus agalactiae; identical to SEQ ID NO: 1314

SEQ ID NO: 1316 - DNA, 1131 bp, Streptococcus agalactiae; identical to SEQ ID NO: 1314

SEQ ID NO: 1317 - DNA, 1131 bp, Streptococcus agalactiae; identical to SEQ ID NO: 1314

SEQ ID NO: 1318 - DNA, 1134 bp, Streptococcus agalactiae
cctaagaagaaatcagataccccagaaaaagaagaagttgtcttaacggaatggcaaaagcgtaaccttgaatttttaaaaaaacgcaaagaagatgaagaagaacaaaaacgtattaacgaaaaattacgcttagataaaagaagtaaattaaatatttcttctcctgaagaacctcaaaatactactaaaattaagaagcttcattttccaaagatttcaaaacctaagattgaaaagaaacagaaaaaagaaaaaatagtcaacagcttagccaaaactaatcgcattagaactgcacctatatttatagtagcattcctagtcattttagtttccgttttcctactaactccttttagtaagcaaaaaacaataacagttagtggaaatcagcatacacctgatgatattttgatagagaaaacgaatattcaaaaaaacgattatttcttttctttaatttttaaacataaagctattgaacaacgtttagctgcagaagatgtatgggtaaaaacagctcagatgacttatcaatttcccaacaagtttcatattcaagttcaagaaaataagattattgcatatgcacatacaaagcaaggatatcagcctgtcttggaaactggaaaaaaggctgatcctgtaaatagttcagagctaccaaagcacttcttaacaattaaccttgataaggaagatagtattaagctattaattaaagatttaaaggctttagaccctgatttaataagtgagattcaggtgataagtttagctgattctaaaacgacacctgacctcctgctgttagatatgcacgatggaaatagtattagaataccattatctaaatttaaagaaagacttcctttttacaaacaaattaagaagaaccttaaggaaccttctattgttgatatggaagtgggagtttacacaacaacaagtactattgaatcaacccctgtgaaagcggaagatacaaaaaataaatcaactgataaaacacaaacccaaaatggtcaggttgcggaaaatagtcaaggacaaacaaataactcaaatactaatcaacaaggacaacaacagatagcaacggagcaggcacccaaccctcaaaatgttaat

SEQ ID NO: 1319 - DNA, 1131 bp, Streptococcus agalactiae; identical to SEQ ID NO: 1312

SEQ ID NO: 1320 - DNA, 1131 bp, Streptococcus agalactiae
cctaagaagaaatcagataccccagaaaaagaagaagttgtcttaacggaatggcaaaagcgtaaccttgaatttttaaaaaaacgcaaagaagatgaagaagaacaaaaacgtattaacgaaaaattacgcttagataaaagaagtaaattaaatatttcttctcctgaagaacctcaaaatactactaaaattaagaagcttcattttccaaagatttcaagacctaagattgaaaagaaacagaaaaaagaaaaaatagtcaacagcttagccaaaactaatcgcattagaactgcacctatatttgtagtagcattcctagtcattttagtttccgttttcctactaactccttttagtaagcaaaaaacaataacagttagtggaaatcagcatacacctgatgatattttgatagagaaaacgaatattcaaaaaaacgattatttcttttctttaatttttaaacataaagctattgaacaacgtttagctgcagaagatgtatgggtaaaaacagctcagatgacttatcaatttcccaataagtttcatattcaagttcaagaaaataagattattgcatatgcacatacaaagcaaggatatcaacctgtcttggaaactggaaaaaaggctgatcctgtaaatagttcagagctaccaaagcacttcttaacaattaaccttgataaggaagatagtattaagctattaattaaagatttaaaggctttagaccctgatttaataagtgagattcaggtgataagtttagctgattctaaaacgacacctgacctcctgctgttagatatgcacgatggaaatagtattasaataccattatctaaatttaaagaaagacttcctttttacaaacaaattaagaagaaccttaaggaaccttctattgttgatatggaagtgggagtttacacaacaacaaataccattgaatcaacccctgttaaagcagaagatacaaaaaataaatcaactgataaaacacaamcacaaaatggtcaggttgcggaaaatagtcaaggacaaacaaataactcaaatactaatcaacaaggacaacagatagcaacagagcaggcacctaaccctcaaaatgttaat

SEQ ID NO: 1321 - DNA, 1129 bp, Streptococcus agalactiae
taagaagaaatcagataccccagaaaaagaagaagttgtcttaacggaatggcaaaagcgtaaccttgaatttttaaaaaaacgcaaagaagatgaagaagaacaaaaacgtattaacgaaaaattacgcttagataaaagaagtaaattaaatatttcttctcctgaagaacctcaaaatactactaaaattaagaagcttcattttccaaagatttcaaaacctaagattgaaaagaaacagaaaaaagaaaaaatagtcaacagcttagccaaaactaatcgcattagaactgcacctatatttgtagtagcattcctagtcattttagtttccgttttcctactaactccttttagtaagcaaaaaacaataacagttagtggaaatcagcatacacctgatgatattttgatagaaaaaacgaatattcaaaaaaacgattatttcttttctttaatttttaaacataaagctattgaacaacgtttagctgcagaagatgtatgggtaaaaacagctcagatgacttatcaatttcccaataagtttcatattcaagttcaagaaaataagattattgcatatgcacatacaaagcaaggatatcagcctgtcttggaaactggaaaaaaggctgatcctgtaaatagttcagagctaccaaagcacttcttaacaattaaccttgataaggaagatagtattaagctattaattaaagatttaaaggctttagaccctgatttaataagtgagattcaggtgataagtttagctgattctaaaacgacacctgacctcctgctgttagatatgcatgatggaaatagtattagaataccattatctaaatttaaagaaagacttcctttttacaaacaaattaagaagaaccttaaggaaccttctattgttgatatggaagtgggagtttacacaacaacaagtactattgaatcaacccctgtgaaagcggaagatacaaaaaataaatcaactgataaaacacaaacacaaaatggtcaggttgcggaaaatagtcaaggacaaacaaataactcaaatactaatcaacaaggacaacagatagcaacagagcaggcacccaaccctcaaaatgttaat

SEQ ID NO: 1322 - protein, 377 aa, Streptococcus agalactiae
PKKKSDTPEKEEVVLTEWQKRNLEFLKKRKEDEEEQKRINEKLRLDKRSKLNISSPEEPQNTTKIKKLHFPKISRPKIEKKQKKEKIVNSLAKTNRIRTAPIFVVAFLVILVSVFLLTPFSKQKTITVSGNQHTPDDILIEKTNIQKNDYFFSLIFKHKAIEQRLAAEDVWVKTAQMTYQFPNKFHIQVQENKIIAYAHTKQGYQPVLETGKKADPVNSSELPKHFLTINLDKEDSIKLLIKDLKALDPDLISEIQVISLADSKTTPDLLLLDMHDGNSIRIPLSKFKERLPFYKQIKKNLKEPSIVDMEVGVYTTTNTIESTPVKAEDTKNKSTDKTQTQNGQVAENSQGQTNNSNTNQQGQQIATEQAPNPQNVN

SEQ ID NO: 1323 - protein, 377 aa, Streptococcus agalactiae; identical to SEQ ID NO: 1322

SEQ ID NO: 1324 - protein, 377 aa, Streptococcus agalactiae; identical to SEQ ID NO: 1322

SEQ ID NO: 1325 - protein, 377 aa, Streptococcus agalactiae
PKKKSDTPEKEEVVLTEWQKRNLEFLKKRKEDEEEQKRINEKLRLDKRSKLNISSPEEPQNTTKIKKLHFPKISKPKIEKKQKKEKIVNSLAKTNRIRTAPIFVVAFLVILVSVFLLTPFSKQKTITVSGNQHTPDDILIEKTNIQKNDYFFSLIFKHKAIEQRLAAEDVWVKTAQMTYQFPNKFHIQVQENKIIAYAHTKQGYQPVLETGKKADPVNSSELPKHFLTINLDKEDSIKLLIKDLKALDPDLISEIQVISLADSKTTPDLLLLDMHDGNSIRIPLSKFKERLPFYKQIKKNLKEPSIVDMEVGVYTTTSTIESTPVKAEDTKNKSTDKTQTQNGQVAENSQGQTNNSNTNQQGQQIATEQAPNPQNVN

SEQ ID NO: 1326 - protein, 377 aa, Streptococcus agalactiae; identical to SEQ ID NO: 1325

SEQ ID NO: 1327 - protein, 377 aa, Streptococcus agalactiae; identical to SEQ ID NO: 1325

SEQ ID NO: 1328 - protein, 377 aa, Streptococcus agalactiae; identical to SEQ ID NO: 1325

SEQ ID NO: 1329 - protein, 378 aa, Streptococcus agalactiae
PKKKSDTPEKEEVVLTEWQKRNLEFLKKRKEDEEEQKRINEKLRLDKRSKLNISSPEEPQNTTKIKKLHFPKISKPKIEKKQKKEKIVNSLAKTNRIRTAPIFIVAFLVILVSVFLLTPFSKQKTITVSGNQHTPDDILIEKTNIQKNDYFFSLIFKHKAIEQRLAAEDVWVKTAQMTYQFPNKFHIQVQENKIIAYAHTKQGYQPVLETGKKADPVNSSELPKHFLTINLDKEDSIKLLIKDLKALDPDLISEIQVISLADSKTTPDLLLLDMHDGNSIRIPLSKFKERLPFYKQIKKNLKEPSIVDMEVGVYTTTSTIESTPVKAEDTKNKSTDKTQTQNGQVAENSQGQTNNSNTNQQGQQQIATEQAPNPQNVN

SEQ ID NO: 1330 - protein, 377 aa, Streptococcus agalactiae; identical to SEQ ID NO: 1322

SEQ ID NO: 1331 - protein, 377 aa, Streptococcus agalactiae
  VARIANT 281, 340: Xaa = Any Amino Acid
PKKKSDTPEKEEVVLTEWQKRNLEFLKKRKEDEEEQKRINEKLRLDKRSKLNISSPEEPQNTTKIKKLHFPKISRPKIEKKQKKEKIVNSLAKTNRIRTAPIFVVAFLVILVSVFLLTPFSKQKTITVSGNQHTPDDILIEKTNIQKNDYFFSLIFKHKAIEQRLAAEDVWVKTAQMTYQFPNKFHIQVQENKIIAYAHTKQGYQPVLETGKKADPVNSSELPKHFLTINLDKEDSIKLLIKDLKALDPDLISEIQVISLADSKTTPDLLLLDMHDGNSIXIPLSKFKERLPFYKQIKKNLKEPSIVDMEVGVYTTTNTIESTPVKAEDTKNKSTDKTQXQNGQVAENSQGQTNNSNTNQQGQQIATEQAPNPQNVN

SEQ ID NO: 1332 - protein, 376 aa, Streptococcus agalactiae
KKKSDTPEKEEVVLTEWQKRNLEFLKKRKEDEEEQKRINEKLRLDKRSKLNISSPEEPQNTTKIKKLHFPKISKPKIEKKQKKEKIVNSLAKTNRIRTAPIFVVAFLVILVSVFLLTPFSKQKTITVSGNQHTPDDILIEKTNIQKNDYFFSLIFKHKAIEQRLAAEDVWVKTAQMTYQFPNKFHIQVQENKIIAYAHTKQGYQPVLETGKKADPVNSSELPKHFLTINLDKEDSIKLLIKDLKALDPDLISEIQVISLADSKTTPDLLLLDMHDGNSIRIPLSKFKERLPFYKQIKKNLKEPSIVDMEVGVYTTTSTIESTPVKAEDTKNKSTDKTQTQNGQVAENSQGQTNNSNTNQQGQQIATEQAPNPQNVN

SEQ ID NO: 1333 - DNA, 1629 bp, Streptococcus agalactiae
atgaaaaaaggacaagtaaatgatactaagcaatcttactctctacgtaaatataaatttggtttagcatcagtaattttagggtcattcataatggtcacaagtcctgtttttgcggatcaaactacatcggttcaagttaataatcagacaggcactagtgtggatgctaataattcttccaatgagacaagtgcgtcaagtgtgattacttccaataatgatagtgttcaagcgtctgataaagttgtaaatagtcaaaatacggcaacaaaggacattactactcctttagtagagacaaagccaatggtggaaaaaacattacctgaacaagggaattatgtttatagcaaagaaaccgaggtgaaaaatacaccttcaaaatcagccccagtagctttctatgcaaagaaaggtgataaagttttctatgaccaagtatttaataaagataatgtgaaatggatttcatataagtctttttgtggcgtacgtcgatacgcagctattgagtcactagatccatcaggaggttcagagactaaagcacctactcctgtaacaaattcaggaagcaataatcaagagaaaatagcaacgcaaggaaattatacattttcacataaagtagaagtaaaaaatgaagctaaggtagcgagtccaactcaatttacattggacaaaggagacagaattttttacgaccaaatactaactattgaaggaaatcagtggttatcttataaatcattcaatggtgttcgtcgttttgttttgctaggtaaagcatcttcagtagaaaaaactgaagataaagaaaaagtgtctcctcaaccacaagcccgtattactaaaactggtagactgactatttctaacgaaacaactacaggttttgatattttaattacgaatattaaagatgataacggtatcgctgctgttaaggtaccggtttggactgaacaaggagggcaagatgatattaaatggtatacagctgtaactactggggatggcaactacaaagtagctgtatcatttgctgaccataagaatgagaagggtctttataatattcatttatactaccaagaagctagtgggacacttgtaggtgtaacaggaactaaagtgacagtagctggaactaattcttctcaagaacctattgaaaatggtttagcaaagactggtgtttataatattatcggaagtactgaagtaaaaaatgaagctaaaatatcaagtcagacccaatttactttagaaaaaggtgacaaaataaattatgatcaagtattgacagcagatggttaccagtggatttcttacaaatcttatagtggtgttcgtcgctatattcctgtgaaaaagctaactacaagtagtgaaaaagcgaaagatgaggcgactaaaccgactagttatcccaacttacctaaaacaggtacctatacatttactaaaactgtagatgtgaaaagtcaacctaaagtatcaagtccagtggaatttaattttcaaaagggtgaaaaaatacattatgatcaagtgttagtagtagatggtcatcagtggatttcatacaagagttattccggtattcgtcgctatattgaaatt

SEQ ID NO: 1334 - DNA, 1626 bp, Streptococcus agalactiae
aaaaaaggacaagtaaatgatactaagcaatcttactctctacgtaaatataaatttggtttagcatcagtaattttagggtcattcataatggtcacaagtcctgtttttgcggatcaaactacatcggttcaagttaataatcagacaggcactagtgtggatgctaataattcttccaatgagacaagtgcgtcaagtgtgattacttccaataatgatagtgttcaagcgtctgataaagttgtaaatagtcaaaatacggcaacaaaggacattactactcctttagtagagacaaagccaatggtggaaaaaacattacctgaacaagggaattatgtttatagcaaagaaaccgaggtgaaaaatacaccttcaaaatcagccccagtagctttctatgcaaagaaaggtgataaagttttctatgaccaagtatttaataaagataatgtgaaatggatttcatataagtctttttgtggcgtacgtcgatacgcagctattgagtcactagatccatcaggaggttcagagactaaagcacctactcctgtaacaaattcaggaagcaataatcaagagaaaatagcaacgcaaggaaattatacattttcacataaagtagaagtaaaaaatgaagctaaggtagcgagtccaactcaatttacattggacaaaggagacagaattttttacgaccaaatactaactattgaaggaaatcagtggttatcttataaatcattcaatggtgttcgtcgttttgttttgctaggtaaagcatcttcagtagaaaaaactgaagataaagaaaaagtgtctcctcaaccacaagcccgtattactaaaactggtagactgactatttctaacgaaacaactacaggttttgatattttaattacgaatattaaagatgataacggtatcgctgctgttaaggtaccggtttggactgaacaaggagggcaagatgatattaaatggtatacagctgtaactactggggatggcaactacaaagtagctgtatcatttgctgaccataagaatgagaagggtctttataatattcatttatactaccaagaagctagtgggacacttgtaggtgtaacaggaactaaagtgacagtagctggaactaattcttctcaagaacctattgaaaatggtttagcaaagactggtgtttataatattatcggaagtactgaagtaaaaaatgaagctaaaatatcaagtcagacccaatttactttagaaaaaggtgacaaaataaattatgatcaagtattgacagcagatggttaccagtggatttcttacaaatcttatagtggtgttcgtcgctatattcctgtgaaaaagctaactacaagtagtgaaaaagcgaaagatgaggcgactaaaccgactagttatcccaacttacctaaaacaggtacctatacatttactaaaactgtagatgtgaagagtcaacctaaagtatcaagtccagtggaatttaattttcaaaagggtgaaaaaatacattatgatcaagtgttagtagtagatggtcatcagtggatttcatacaagagttattccggtattcgtcgctatattgaaatt

SEQ ID NO: 1335 - DNA, 1626 bp, Streptococcus agalactiae; identical to SEQ ID NO: 1334

SEQ ID NO: 1336 - DNA, 1626 bp, Streptococcus agalactiae
aaaaaaggacaagtaaatgatactaagcaatcttactctctacgtaaatataaatttggtttagcatcagtaattttagggtcattcataatggtcacaagtcctgtttttgcggatcaaactacatcggttcaagttaataatcagacaggcactagtgtggatgataataattcttccaatgagacaagtgcgtcaagtgtgattacttccaataatgatagtgttcaagcgtctgataaagttgtaaatagtcaaaatacggcaacaaaggacattactactcctttagtagagacaaagccaatggtggaaaaaacattacctgaacaagggaattatgtttatagcaaagaaaccgaggtgaaaaatacaccttcaaaatcagccccagtagctttctatgcaaagaaaggtgataaagttttctatgaccaagtatttaataaagataatgtgaaatggatttcatataagtctttttgtggcgtacgtcgatacgcagctattgagtcactagatccatcaggaggttcagagactaaagcacctactcctgtaacaaattcaggaagcaataatcaagagaaaatagcaacgcaaggaaattatacattttcacataaagtagaagtaaaaaatgaagctaaggtagcgagtccaactcaatttacattggacaaaggagacagaattttttacgaccaaatactaactattgaaggaaatcagtggttatcttataaatcattcaatggtgttcgtcgttttgttttgctaggtaaagcatcttcagtagaaaaaactgaagataaagaaaaagtgtctcctcaaccacaagcccgtattactaaaactggtagactgactatttctaacgaaacaactacaggttttgatattttaattacgaatattaaagatgataacggtatcgctgctgttaaggtaccggtttggactgaacaaggagggcaagatgatattaaatggtatacagctgtaactactggggatggcaactacaaagtagctgtatcatttgctgaccataagaatgagaagggtctttataatattcatttatactaccaagaagctagtgggacacttgtaggtgtaacaggaactaaagtgacagtagctggaactaattcttctcaagaacctattgaaaatggtttagcaaagactggtgtttataatattatcggaagtactgaagtaaaaaatgaagctaaaatatcaagtcagacccaatttactttagaaaaaggtgacaaaataaattatgatcaagtattgacagcagatggttaccagtggatttcttacaaatcttatagtggtgttcgtcgctatattcctgtgaaaaagctaactacaagtagtgaaaaagcgaaagatgaggcgactaaaccgactagttatcccaacttacctaaaacaggtacctatacatttactaaaactgtagatgtgaagagtcaacctaaagtatcaagtccagtggaatttaattttcaaaagggtgaaaaaatacattatgatcaagtgttagtagtagatggtcatcagtggatttcatacaagagttattccggtattcgtcgctatattgaaatt

SEQ ID NO: 1337 - DNA, 1626 bp, Streptococcus agalactiae
aaaaaaggacaagtaaatgatactaagcaatcttactctctacgtaaatataaatttggtttagcatcagtaattttagggtcattcataatggtcacaagtcctgtttttgcggatcaaactacatcggttcaagttaataatcagacaggcactagtgtggatgctaataattcttccaatgagacaagtgcgtcaagtgtgattacttccaataatgatagtgttcaagcgtctgataaagttgtaaatagtcaaaatacggcaacaaaggacattactactcctttagtagagacaaagccaatggtggaaaaaacattacctgaacaagggaattatgtttatagcaaagaaaccgaggtgaaaaatacaccttcaaaatcagccccagtagctttctatgcaaagaaaggtgataaagttttctatgaccaagtatttaataaagataatgtgaaatggatttcatataagtctttttgtggcgtacgtcgatacgcagctattgagtcactagatccatcaggaggttcagagactaaagcacctactcctgtaacaaattcaggaagcaataatcaagagaaaatagcaacgcaaggaaattatacattttcacataaagtagaagtaaaaaatgaagctaaggtagcgagtccaactcaatttacattggacaaaggagacagaattttttacgaccaaatactaactattgaaggaaatcagtggttatcttataaatcattcaatggtgttcgtcgttttgttttgctaggtaaagcatcttcagtagaaaaaactgaagataaagaaaaagtgtctcctcaaccacaagcccgtattactaaaactggtagactgactatttctaacgaaacaactacaggttttgatattttaattacgaatattaaagatgataacggtatcgctgctgttaaggtaccggtttggactgaacaaggagggcaagatgatattaaatggtatacagctgtaactactggggatggcaactacaaagtagctgtatcatttgctgaccataagaatgagaagggtctttataatattcatttatactaccaagaagctagtgggacacttgtaggtgtaacaggaactaaagtgacagtagctggaactaattcttctcaagaacctattgaaaatggtttagcaaagactggtgtttataatattatcggaagtactgaagtaaaaaatgaagctaaaatatcaagtcagacccaatttactttagaaaaaggtgacaaaataaattatgatcaagtattgacagcagatggttaccagtggatttcttacaaatcttatagtggtgttcgtcgctatattcctgtgaaaaagctaactacaagtagtgaaaaagcgaaagatgaggcgactaaaccgactagttatcccaacttacctaaaacaggtacctatacatttactaaaactgtagatgtgaaaagtcaacctaaagtatcaagtccagtggaatttaattttcaaaagggtgaaaaaatacattatgatcaagtgttagtagtagatggtcatcagtggatttcatacaagagttattccggtattcgtcgctatattgaaatt

SEQ ID NO: 1338 - DNA, 1617 bp, Streptococcus agalactiae
caagtaaatgatactaagcaatcttactctctacgtaaatataaatttggtttagcatcagtaattttagggtcattcataatggtcacaagtcctgtttttgcggatcaaactacatcggttcaagttaataatcagacaggcactagtgtggatgctaataattcttccaatgagacaagtgcgtcaagtgtgattacttccaataatgatagtgttcaagcgtctgataaagttgtaaatagtcaaaatacggcaacaaaggacattactactcctttagtagagacaaagccaatggtggaaaaaacattacctgaacaagggaattatgtttatagcaaagaaaccgaggtgaaaaatacaccttcaaaatcagccccagtagctttctatgcaaagaaaggtgataaagttttctatgaccaagtatttaataaagataatgtgaaatggatttcatataagtcttttggtggcgtacgtcgatacgcagctattgagtcactagatccatcaggaggttcagagactaaagcacctactcctgtaacaaattcaggaagcaataatcaagagaaaatagcaacgcaaggaaattatacattttcacataaagtagaagtaaaaaatgaagctaaggtagcgagtccaactcaatttacattggacaaaggagacagaattttttacgaccaaatactaactattgaaggaaatcagtggttatcttataaatcattcaatggtgttcgtcgttttgttttgctaggtaaagcatcttcagtagaaaaaactgaagataaagaaaaagtgtctcctcaaccacaagcccgtattactaaaactggtagactgactatttctaacgaaacaactacaggttttgatattttaattacgaatattaaagatgataacggtatcgctgctgttaaggtaccggtttggactgaacaaggagggcaagatgatattaaatggtatacagctgtaactactggggatggcaactacaaagtagctgtatcatttgctgaccataagaatgagaagggtctttataatattcatttatactaccaagaagctagtgggacacttgtaggtgtaacaggaactaaagtgacagtagctggaactaattcttctcaagaacctattgaaaatggtttaccaaagactggtgtttataatattatcggaagtactgaagtaaaaaatgaagctaaaatatcaagtcagacccaatttactttagaaaaaggtgacaaaataaattatgatcaagtattgacagcagatggttaccagtggatttcttacaaatcttatagtggtgttcgtcgctatattcctgtgaaaaagctaactacaagtagtgaaaaagcgaaagatgaggcgactaaaccgactagttatcccaacttacctaaaacaggtacctatacatttactaaaactgtagatgtgaaaagtcaacctaaagtatcaagtccagtggaatttaattttcaaaagggtgaaaaaatacattatgatcaagtgttagtagtagatggtcatcagtggatttcatacaagagttattccggtattcgtcgctatattgaaatt

SEQ ID NO: 1339 - DNA, 1626 bp, Streptococcus agalactiae
aaaaaaggacaagtaaatgatactaagcaatcttactctctacgtaaatataaatttggtttagcatcagtaattttagggtcattcataatggtcacaagtcctgtttttgcggatcaaactacatcggttcaagttaataatcagacaggcactagtgtggatgctaataattcttccaatgagacaagtgcgtcaagtgtgattacttccaataatgatagtgttcaagcgtctgataaagttgtaaatagtcaaaatacggcaacaaaggacattactactcctttagtagagacaaagccaatggtggaaaaaacattacctgaacaagggaattatgtttatagcaaagaaaccgaggtgaaaaatacaccttcaaaatcagccccagtagctttctatgcaaagaaaggtgataaagttttctatgaccaagtatttaataaagataatgttaaatggatttcatataagtcttttggtggcgtacgtcgatacgcagctattgagtcactagatccatcaggaggttcagagactaaagcacctactcctgtaacaaattcaggaagcaataatcaagagaaaatagcaacgcaaggaaattatacattttcacataaagtagaagtaaaaaatgaagctaaggtagcgagtccaactcaatttacattggacaaaggagacagaattttttacgaccaaatactaactattgaaggaaatcagtggttatcttataaatcattcaatggtgttcgtcgttttgttttgctaggtaaagcatcttcagtagaaaaaactgaagataaagaaaaagtgtctcctcaaccacaagcccgtattactaaaactggtagactgactatttctaacgaaacaactacaggttttgatattttaattacgaatattaaagatgataacggtatcgctgctgttaaggtaccggtttggactgaacaaggagggcaagatgatattaaatggtatacagctgtaactactggggatggcaactacaaagtagctgtatcatttgctgaccataagaatgagaagggtctttataatattcatttatactaccaagaagctagtgggacacttgtaggtgtaacaggaactaaagtgacagtagctggaactaattcttctcaagaacctattgaaaatggtttaccaaagactggtgtttataatattatcggaagtactgaagtaaaaaatgaagctaaaatatcaagtcagacccaatttactttagaaaaaggtgacaaaataaattatgatcaagtattgacagcagatggttaccagtggatttcttacaaatcttatagtggtgttcgtcgctatattcctgtgaaaaagctaactacaagtagtgaaaaagcgaaagatgaggcgactaaaccgactagttatcccaacttacctaaaacaggtacctatacatttactaaaactgtagatgtgaaaagtcaacctaaagtatcaagtccagtggaatttaattttcaaaagggtgaaaaaatacattatgatcaagtgttagtagtagatggtcatcagtggatttcatacaagagttattccggtattcgtcgctatattgaaatt

SEQ ID NO: 1340 - DNA, 1626 bp, Streptococcus agalactiae
aaaaaaggacaagtaaatgatactaagcaatcttactctctacgtaaatataaatttggtttagcatcagtaattttagggtcattcataatggtcacaagtcctgtttttgcggatcaaactacatcggttcaagttaataatcagacaggcactagtgtggatgctaataattcttccaatgagacaagtgcgtcaagtgtgattacttccaataatgatagtgttcaagcgtctgataaagttgtaaatagtcaaaatacggcaacaaaggacattactactcctttagtagagacaaagccaatggtggaaaaaacattacctgaacaagggaattatgtttatagcaaagaaaccgaggtgaaaaatacaccttcaaaatcagccccagtagctttctatgcaaagaaaggtgataaagttttctatgaccaagtatttaataaagataatgtgaaatggatttcatataagtcttttggtggcgtacgtcgatacgcagctattgagtcactagatccatcaggaggttcagagactaaagcacctactcctgtaacaaattcaggaagcaataatcaagagaaaatagcaacgcaaggaaattatacattttcacataaagtagaagtaaaaaatgaagctaaggtagcgagtccaactcaatttacattggacaaaggagacagaattttttacgaccaaatactaactattgaaggaaatcagtggttatcttataaatcattcaatggtgttcgtcgttttgttttgctaggtaaagcatcttcagtagaaaaaactgaagataaagaaaaagtgtctcctcaaccacaagcccgtattactaaaactggtagactgactatttctaacgaaacaactacaggttttgatattttaattacgaatattaaagatgataacggtatcgctgctgttaaggtaccggtttggactgaacaaggagggcaagatgatattaaatggtatacagctgtaactactggggatggcaactacaaagtagctgtatcatttgctgaccataagaatgagaagggtctttataatattcatttatactaccaagaagctagtgggacacttgtaggtgtaacaggaactaaagtgacagtagctggaactaattcttctcaagaacctattgaaaatggtttaccaaagactggtgtttataatattatcggaagtactgaagtaaaaaatgaagctaaaatatcaagtcagacccaatttactttagaaaaaggtgacaaaataaattatgatcaagtattgacagcagatggttaccagtggatttcttacaaatcttatagtggtgttcgtcgctatattcctgtgaaaaagctaactacaagtagtgaaaaagcgaaagatgaggcgactaaaccgactagttatcccaacttacctaaaacaggtacctatacatttactaaaactgtagatgtgaaaagtcaacctaaagtatcaagtccagtggaatttaattttcaaaagggtgaaaaaatacattatgatcaagtgttagtagtagatggtcatcagtggatttcatacaagagttattccggtattcgtcgctatattgaaatt

SEQ ID NO: 1341 - DNA, 1626 bp, Streptococcus agalactiae; identical to SEQ ID NO: 1334

SEQ ID NO: 1342 - DNA, 1626 bp, Streptococcus agalactiae
aaaaaaggacaagtaaatgatactaagcaatcttactctctacgtaaatataaatttggtttagcatcagtaattttagggtcattcataatggtcacaagtcctgtttttgcggatcaaactacatcggttcaagttaataatcagacaggcactagtgtggatgctaataattcttccaatgagacaagtgcgtcaagtgtgattacttccaataatgatagtgttcaagcgtctgataaagttgtaaatagtcaaaatacggcaacaaaggacattactactcctttagtagagacaaagccaatggtggaaaaaacattacctgaacaagggaattatgtttatagcaaagaaaccgaggtgaaaaatacaccttcaaaatcagccccagtagctttctatgcaaagaaaggtgataaagttttctatgaccaagtatttaataaagataatgtgaaatggatttcatataagtcttttggtggcgtacgtcgatacgcagctattgagtcactagatccatcaggaggttcagagactaaagcacctactcctgtaacaaattcaggaagcaataatcaagagaaaatagcaacgcaaggaaattatacattttcacataaagtagaagtaaaaaatgaagctaaggtagcgagtccaactcaatttacattggacaaaggagacagaattttttacgaccaaatactaactattgaaggaaatcagtggttatcttataaatcattcaatggtgttcgtcgttttgttttgctaggtaaagcatcttcagtagaaaaaactgaagataaagaaaaagtgtctcctcaaccacaagcccgtattactaaaactggtagactgactatttctaacgaaacaactacaggttttgatattttaattacgaatattaaagatgataacggtatcgctgctgttaaggtaccggtttggactgaacaaggagggcaagatgatattaaatggtatacagctgtaactactggggatggcaactacaaagtagctgtatcatttgctgaccataagaatgagaagggtctttataatattcatttatactaccaagaagctagtgggacacttgtaggtgtaacaggaactaaagtgacagtagctggaactaattcttctcaagaacctattgaaaatggtttagcaaagactggtgtttataatattatcggaagtactgaagtaaaaaatgaagctaaaatatcaagtcagacccaatttactttagaaaaaggtgacaaaataaattatgatcaagtattgacagcagatggttaccagtggatttcttacaaatcttatagtggtgttcgtcgctatattcctgtgaaaaagctaactacaagtagtgaaaaagcgaaagatgaggcgactaaaccgactagttatcccaacttacctaaaacaggtacctatacatttactaaaactgtagatgtgaaaagtcaacctaaagtatcaagtccagtggaatttaattttcaaaagggtgaaaaaatacattatgatcaagtgttagtagtagatggtcatcagtggatttcatacaagagttattccggtattcgtcgctatattgaaatt

SEQ ID NO: 1343 - DNA, 1626 bp, Streptococcus agalactiae
aaaaaaggacaagtaaatgatactaagcaatcttactctctacgtaaatataaatttggtttagcatcagtaattttagggtcattcataatggtcacaagtcctgtttttgcggatcaaactacatcggttcaagttaataatcagacaggcactagtgtggatgctaataattcttccaatgagacaagtgcgtcaagtgtgattacttccaataatgatagtgttcaagcgtctgataaagttgtaaatagtcaaaatacggcaacaaaggacattactactcctttagtagagacaaagccaatggtggaaaaaacattacctgaacaagggaattatgtttatagcaaagaaaccgaggtgaaaaatacaccttcaaaatcagccccagtagctttctatgcaaagaaaggtgataaagttttctatgaccaagtatttaataaagataatgtgaaatggatttcatataagtctttttgtggcgtacgtcgatacgcagctattgagtcactagatccatcaggaggttcagagactaaagcacctactcctgtaacaaattcaggaagcaataatcaagagaaaatagcaacgcaaggaaattatacattttcacataaagtagaagtaaaaaatgaagctaaggtagcgagtccaactcaatttacattggacaaaggagacagaattttttacgaccaaatactaactattgaaggaaatcagtggttatcttataaatcattcaatggtgttcgtcgttttgttttgctaggtaaagcatcttcagtagaaaaaactgaagataaagaaaaagtgtctcctcaaccacaagcccgtattactaaaactggtagactgactatttataacgaaacaactacaggttttgatattttaattacgaatattaaagatgataacggtatcgctgctgttaaggtaccggtttggactgaacaaggagggcaagatgatattaaatggtatacagctgtaactactggggatggcaactacaaagtagctgtatcatttgctgaccataagaatgagaagggtctttataatattcatttatactaccaagaagctagtgggacacttgtaggtgtaacaggaactaaagtgacagtagctggaactaattcttctcaagaacctattgaaaatggtttagcaaagactggtgtttataatattatcggaagtactgaagtaaaaaatgaagctaaaatatcaagtcagacccaatttactttagaaaaaggtgacaaaataaattatgatcaagtattgacagcagatggttaccagtggatttcttacaaatcttatagtggtgttcgtcgctatattcctgtgaaaaagctaactacaagtagtgaaaaagcgaaagatgaggcgactaaaccgactagttatcccaacttacctaaaacaggtacctatacatttactaaaactgtagatgtgaagagtcaacctaaagtatcaagtccagtggaatttaattttcaaaagggtgaaaaaatacattatgatcaagtgttagtagtagatggtcatcagtggatttcatacaagagttattccggtattcgtcgctatattgaaatt

SEQ ID NO: 1344 - protein, 543 aa, Streptococcus agalactiae
MKKGQVNDTKQSYSLRKYKFGLASVILGSFIMVTSPVFADQTTSVQVNNQTGTSVDANNSSNETSASSVITSNNDSVQASDKVVNSQNTATKDITTPLVETKPMVEKTLPEQGNYVYSKETEVKNTPSKSAPVAFYAKKGDKVFYDQVFNKDNVKWISYKSFCGVRRYAAIESLDPSGGSETKAPTPVTNSGSNNQEKIATQGNYTFSHKVEVKNEAKVASPTQFTLDKGDRIFYDQILTIEGNQWLSYKSFNGVRRFVLLGKASSVEKTEDKEKVSPQPQARITKTGRLTISNETTTGFDILITNIKDDNGIAAVKVPVWTEQGGQDDIKWYTAVTTGDGNYKVAVSFADHKNEKGLYNIHLYYQEASGTLVGVTGTKVTVAGTNSSQEPIENGLAKTGVYNIIGSTEVKNEAKISSQTQFTLEKGDKINYDQVLTADGYQWISYKSYSGVRRYIPVKKLTTSSEKAKDEATKPTSYPNLPKTGTYTFTKTVDVKSQPKVSSPVEFNFQKGEKIHYDQVLVVDGHQWISYKSYSGIRRYIEI

SEQ ID NO: 1345 - protein, 542 aa, Streptococcus agalactiae
KKGQVNDTKQSYSLRKYKFGLASVILGSFIMVTSPVFADQTTSVQVNNQTGTSVDANNSSNETSASSVITSNNDSVQASDKVVNSQNTATKDITTPLVETKPMVEKTLPEQGNYVYSKETEVKNTPSKSAPVAFYAKKGDKVFYDQVFNKDNVKWISYKSFCGVRRYAAIESLDPSGGSETKAPTPVTNSGSNNQEKIATQGNYTFSHKVEVKNEAKVASPTQFTLDKGDRIFYDQILTIEGNQWLSYKSFNGVRRFVLLGKASSVEKTEDKEKVSPQPQARITKTGRLTISNETTTGFDILITNIKDDNGIAAVKVPVWTEQGGQDDIKWYTAVTTGDGNYKVAVSFADHKNEKGLYNIHLYYQEASGTLVGVTGTKVTVAGTNSSQEPIENGLAKTGVYNIIGSTEVKNEAKISSQTQFTLEKGDKINYDQVLTADGYQWISYKSYSGVRRYIPVKKLTTSSEKAKDEATKPTSYPNLPKTGTYTFTKTVDVKSQPKVSSPVEFNFQKGEKIHYDQVLVVDGHQWISYKSYSGIRRYIEI

SEQ ID NO: 1346 - protein, 542 aa, Streptococcus agalactiae; identical to SEQ ID NO: 1345

SEQ ID NO: 1347 - protein, 542 aa, Streptococcus agalactiae
KKGQVNDTKQSYSLRKYKFGLASVILGSFIMVTSPVFADQTTSVQVNNQTGTSVDDNNSSNETSASSVITSNNDSVQASDKVVNSQNTATKDITTPLVETKPMVEKTLPEQGNYVYSKETEVKNTPSKSAPVAFYAKKGDKVFYDQVFNKDNVKWISYKSFCGVRRYAAIESLDPSGGSETKAPTPVTNSGSNNQEKIATQGNYTFSHKVEVKNEAKVASPTQFTLDKGDRIFYDQILTIEGNQWLSYKSFNGVRRFVLLGKASSVEKTEDKEKVSPQPQARITKTGRLTISNETTTGFDILITNIKDDNGIAAVKVPVWTEQGGQDDIKWYTAVTTGDGNYKVAVSFADHKNEKGLYNIHLYYQEASGTLVGVTGTKVTVAGTNSSQEPIENGLAKTGVYNIIGSTEVKNEAKISSQTQFTLEKGDKINYDQVLTADGYQWISYKSYSGVRRYIPVKKLTTSSEKAKDEATKPTSYPNLPKTGTYTFTKTVDVKSQPKVSSPVEFNFQKGEKIHYDQVLVVDGHQWISYKSYSGIRRYIEI

SEQ ID NO: 1348 - protein, 542 aa, Streptococcus agalactiae; identical to SEQ ID NO: 1345

SEQ ID NO: 1349 - protein, 539 aa, Streptococcus agalactiae
QVNDTKQSYSLRKYKFGLASVILGSFIMVTSPVFADQTTSVQVNNQTGTSVDANNSSNETSASSVITSNNDSVQASDKVVNSQNTATKDITTPLVETKPMVEKTLPEQGNYVYSKETEVKNTPSKSAPVAFYAKKGDKVFYDQVFNKDNVKWISYKSFGGVRRYAAIESLDPSGGSETKAPTPVTNSGSNNQEKIATQGNYTFSHKVEVKNEAKVASPTQFTLDKGDRIFYDQILTIEGNQWLSYKSFNGVRRFVLLGKASSVEKTEDKEKVSPQPQARITKTGRLTISNETTTGFDILITNIKDDNGIAAVKVPVWTEQGGQDDIKWYTAVTTGDGNYKVAVSFADHKNEKGLYNIHLYYQEASGTLVGVTGTKVTVAGTNSSQEPIENGLPKTGVYNIIGSTEVKNEAKISSQTQFTLEKGDKINYDQVLTADGYQWISYKSYSGVRRYIPVKKLTTSSEKAKDEATKPTSYPNLPKTGTYTFTKTVDVKSQPKVSSPVEFNFQKGEKIHYDQVLVVDGHQWISYKSYSGIRRYIEI

SEQ ID NO: 1350 - protein, 542 aa, Streptococcus agalactiae
KKGQVNDTKQSYSLRKYKFGLASVILGSFIMVTSPVFADQTTSVQVNNQTGTSVDANNSSNETSASSVITSNNDSVQASDKVVNSQNTATKDITTPLVETKPMVEKTLPEQGNYVYSKETEVKNTPSKSAPVAFYAKKGDKVFYDQVFNKDNVKWISYKSFGGVRRYAAIESLDPSGGSETKAPTPVTNSGSNNQEKIATQGNYTFSHKVEVKNEAKVASPTQFTLDKGDRIFYDQILTIEGNQWLSYKSFNGVRRFVLLGKASSVEKTEDKEKVSPQPQARITKTGRLTISNETTTGFDILITNIKDDNGIAAVKVPVWTEQGGQDDIKWYTAVTTGDGNYKVAVSFADHKNEKGLYNIHLYYQEASGTLVGVTGTKVTVAGTNSSQEPIENGLPKTGVYNIIGSTEVKNEAKISSQTQFTLEKGDKINYDQVLTADGYQWISYKSYSGVRRYIPVKKLTTSSEKAKDEATKPTSYPNLPKTGTYTFTKTVDVKSQPKVSSPVEFNFQKGEKIHYDQVLVVDGHQWISYKSYSGIRRYIEI

SEQ ID NO: 1351 - protein, 542 aa, Streptococcus agalactiae; identical to SEQ ID NO: 1350

SEQ ID NO: 1352 - protein, 542 aa, Streptococcus agalactiae; identical to SEQ ID NO: 1345

SEQ ID NO: 1353 - protein, 542 aa, Streptococcus agalactiae
KKGQVNDTKQSYSLRKYKFGLASVILGSFIMVTSPVFADQTTSVQVNNQTGTSVDANNSSNETSASSVITSNNDSVQASDKVVNSQNTATKDITTPLVETKPMVEKTLPEQGNYVYSKETEVKNTPSKSAPVAFYAKKGDKVFYDQVFNKDNVKWISYKSFGGVRRYAAIESLDPSGGSETKAPTPVTNSGSNNQEKIATQGNYTFSHKVEVKNEAKVASPTQFTLDKGDRIFYDQILTIEGNQWLSYKSFNGVRRFVLLGKASSVEKTEDKEKVSPQPQARITKTGRLTISNETTTGFDILITNIKDDNGIAAVKVPVWTEQGGQDDIKWYTAVTTGDGNYKVAVSFADHKNEKGLYNIHLYYQEASGTLVGVTGTKVTVAGTNSSQEPIENGLAKTGVYNIIGSTEVKNEAKISSQTQFTLEKGDKINYDQVLTADGYQWISYKSYSGVRRYIPVKKLTTSSEKAKDEATKPTSYPNLPKTGTYTFTKTVDVKSQPKVSSPVEFNFQKGEKIHYDQVLVVDGHQWISYKSYSGIRRYIEI

SEQ ID NO: 1354 - protein, 542 aa, Streptococcus agalactiae
KKGQVNDTKQSYSLRKYKFGLASVILGSFIMVTSPVFADQTTSVQVNNQTGTSVDANNSSNETSASSVITSNNDSVQASDKVVNSQNTATKDITTPLVETKPMVEKTLPEQGNYVYSKETEVKNTPSKSAPVAFYAKKGDKVFYDQVFNKDNVKWISYKSFCGVRRYAAIESLDPSGGSETKAPTPVTNSGSNNQEKIATQGNYTFSHKVEVKNEAKVASPTQFTLDKGDRIFYDQILTIEGNQWLSYKSFNGVRRFVLLGKASSVEKTEDKEKVSPQPQARITKTGRLTIYNETTTGFDILITNIKDDNGIAAVKVPVWTEQGGQDDIKWYTAVTTGDGNYKVAVSFADHKNEKGLYNIHLYYQEASGTLVGVTGTKVTVAGTNSSQEPIENGLAKTGVYNIIGSTEVKNEAKISSQTQFTLEKGDKINYDQVLTADGYQWISYKSYSGVRRYIPVKKLTTSSEKAKDEATKPTSYPNLPKTGTYTFTKTVDVKSQPKVSSPVEFNFQKGEKIHYDQVLVVDGHQWISYKSYSGIRRYIEI
